United States Patent Application Publication US 2025/0326823 A1 - sequence listing, part 2

SEQ ID NO: 718 - DNA, 2829 bp, synthetic construct
  source 1..2829: mol_type = other DNA
gagatcgtgctgacacagagccctggcacactgtcactgtctccaggcgaaacagccacactgagctgtagagccagccagagcttcagcagcgacctggcttggtatcagcagaagcctggacaggcccctcggctgttgatctatggcgcctcttctagagccacaggcatccccgatagattcagcggctctggcagcggcaccgatttcaccctgacaatcagcagactggaacccgccgacttcgccgtgtactactgtcagcagtacggcagcagccctcctgtgacatttggcggcggaacaaaggtggaaatcaaacgtacggtggccgctcccagcgtgttcatcttcccacctagcgacgagcagctgaagtccggcacagcctctgtcgtgtgcctgctgaacaacttctacccccgcgaggccaaagtgcagtggaaggtggacaacgccctgcagagcggcaacagccaggaaagcgtgaccgagcaggacagcaaggactccacctacagcctgagcagcaccctgacactgagcaaggccgactacgagaagcacaaggtgtacgcctgcgaagtgacccaccagggcctgtctagccccgtgaccaagagcttcaaccggggcgagtgtggcggcggaggatctggcggaggtggaagcggaggcggtggaagcagctacgtgctgacacagcctccatccgtgtctgtggctccaggacagaccgccagaatcacatgcggcggcaacaacatcggcaccaagagcgtgcactggtatcagcagaagcctggacaggcccctgtgctcgtgatcagcagcgatagcgatagacctagcggcgtgcccgatagattcagcggcagcaatagcggcaacaccgccacactgaccatcagcagagttgaggctggcgacgaggccgactactactgtcacgtgtgggatagcagcagcgaccactgggttttcggcggaggcacaaagctgacagtgctgggaggtggtggctctggcggatctgggagtggtggcggaggctctgcttctggatctggagaggtgcagctggttgaatctggcggcggaagagtgaagcctggcggatctctgagactgagctgtgccgccagcggcttcaccttcagcagctacagaatgaactgggtccgacaggcccctggcaaaggccttgaatgggtgtccagcatcagcagcggcagctcctacatctacttcgccgacagcgtgaagggcagattcaccatctccagagacaacgccaagaacagcctgttcctgcggatgaacaacctgagagtggaagataccgccgtgtactactgcgccagagcacccacactgagacacagcagcggatggtacgatcctcctggcaccgagaacagcagcttcgatctgtggggcagaggcaccctggtcacagtctcttctggaggcagctccggggaagtgcagctggtggaatcaggcggcggactgattcaacctggcggctctctgagactgtcttgtgctgcttctggcgtgatcgtgtcctacaactacatgaactgggtccgacaggctcccggcaaaggccttgaatgggtgtccgtgatctacagcggcggcagcaccttttacgccgattctgtgcggggcagattcaccatcagccgggacaacagcaagaacaccctgtacctgcagatgaacagcctgagagccgaggacaccgctgtgtactattgcgccagagatctgggacctgccggcgcttttgatatctggggcctgggcacaatggtcaccgtgtctagcgcttcgaccaagggcccatccgtgtttcctctggctcccagcagcaagtctacaagcggaggaacagccgctctgggctgcctggtcaaggattactttcccgagcctgtgaccgtgtcctggaattctggcgctctgacaagcggcgtgcacacctttccagctgtgctgcaaagcagcggcctgtactctctgagcagcgtggtcacagtgcctagctctagcctgggcacccagacctacatctgcaatgtgaaccacaagcctagcaacaccaaggtggacaagagagtggaacccaagagctgcgataagacccacacatgtcctccatgtcctgctccagaattcgaaggcggcccttctgtgttcctgtttcctccaaagcctaaggacaccctgtacatcaccagagaacctgaagtgacctgcgtggtggtggatgtgtctcacgaggaccccgaagtgaagttcaattggtacgtggacggcgtggaagtgcacaacgccaagaccaagcctagagaggaacagtacaacagcacctacagagtggtgtccgtgctgaccgtgctgcaccaggattggctgaacggcaaagagtacaagtgcaaggtgtccaacaaggccctgcctgcttccatcgagaaaaccatcagcaaggccaagggccagcctagggaaccccaggtttacacccttcctccatgtcgggaagagatgaccaagaaccaggtgtccctgtggtgtctggtgaagggcttctaccccagcgacattgccgtggaatgggagagcaatggccagcctgagaacaactacaagacaacccctcctgtgctggacagcgacggctcattcttcctgtacagcaagctgacagtcgacaagtccagatggcagcagggcaacgtgttcagttgcagcgtgatgcacgaggccctgcacaaccactacacccagaagtccctgagcctgtctcctggaaag

SEQ ID NO: 719 - DNA, 2823 bp, synthetic construct
  source 1..2823: mol_type = other DNA
gagatcgtgctgacacagagccctggcacactgtcactgtctccaggcgaaacagccacactgagctgtagagccagccagagcttcagcagcgacctggcttggtatcagcagaagcctggacaggcccctcggctgttgatctatggcgcctcttctagagccacaggcatccccgatagattcagcggctctggcagcggcaccgatttcaccctgacaatcagcagactggaacccgccgacttcgccgtgtactactgtcagcagtacggcagcagccctcctgtgacatttggcggcggaacaaaggtggaaatcaaacgtacggtggccgctcccagcgtgttcatcttcccacctagcgacgagcagctgaagtccggcacagcctctgtcgtgtgcctgctgaacaacttctacccccgcgaggccaaagtgcagtggaaggtggacaacgccctgcagagcggcaacagccaggaaagcgtgaccgagcaggacagcaaggactccacctacagcctgagcagcaccctgacactgagcaaggccgactacgagaagcacaaggtgtacgcctgcgaagtgacccaccagggcctgtctagccccgtgaccaagagcttcaaccggggcgagtgtggcggcggaggatctggcggaggtggaagcggaggcggtggaagcgacaccgtgatgacacagagccctctgagcctgcctgtgacacctggcgaacctgccagcatcagctgtagaagcagccagagcctgctgaacagcaacggctacaactacctggattggtacgtgcagaagcccggccagtctcctcagctgctgatctacctgggcagcaatagagccagcggcgtgcccgatagattttctggctctggcagcggcaccgacttcaccctgaagatctctagagtggaagccgaggacgtgggcgtgtactactgtatgcagcctctgcagacccctctgttcacatttggccctggcaccaaggtggaaatcaaaggaggtggtggctctggcggatctgggagtggtggcggaggctctgcttctggatctggacaagtgacactgagagagtctggccccgctctggtcaagcctacacagaccctgacactgacctgcaccttcagcggcttcagcctgtctactagaggcgtgtgcgtgtcctggatcagacagcctcctggaaaggccctggaatggctggccttcatcgactgggacgacgacaagtactaccagaccagcctgaaaacccggctgaccatcagcaaggacaccagcaagaaccaggtggtgctgaccatgaccaacgtgcaccctgtggataccgccacctactactgcgccagaatcagctctcaccacggctccagctggtgtaccaccttcgattattggggccagggcgctctcgtgacagtttctgctggaggcagctccggggaagtgcagctggtggaatcaggcggcggactgattcaacctggcggctctctgagactgtcttgtgctgcttctggcgtgatcgtgtcctacaactacatgaactgggtccgacaggctcccggcaaaggccttgaatgggtgtccgtgatctacagcggcggcagcaccttttacgccgattctgtgcggggcagattcaccatcagccgggacaacagcaagaacaccctgtacctgcagatgaacagcctgagagccgaggacaccgctgtgtactattgcgccagagatctgggacctgccggcgcttttgatatctggggcctgggcacaatggtcaccgtgtctagcgcttcgaccaagggcccatccgtgtttcctctggctcccagcagcaagtctacaagcggaggaacagccgctctgggctgcctggtcaaggattactttcccgagcctgtgaccgtgtcctggaattctggcgctctgacaagcggcgtgcacacctttccagctgtgctgcaaagcagcggcctgtactctctgagcagcgtggtcacagtgcctagctctagcctgggcacccagacctacatctgcaatgtgaaccacaagcctagcaacaccaaggtggacaagagagtggaacccaagagctgcgataagacccacacatgtcctccatgtcctgctccagaattcgaaggcggcccttctgtgttcctgtttcctccaaagcctaaggacaccctgtacatcaccagagaacctgaagtgacctgcgtggtggtggatgtgtctcacgaggaccccgaagtgaagttcaattggtacgtggacggcgtggaagtgcacaacgccaagaccaagcctagagaggaacagtacaacagcacctacagagtggtgtccgtgctgaccgtgctgcaccaggattggctgaacggcaaagagtacaagtgcaaggtgtccaacaaggccctgcctgcttccatcgagaaaaccatcagcaaggccaagggccagcctagggaaccccaggtttgtacccttcctccatcccgggaagagatgaccaagaaccaggtgtccctgtcctgtgccgtgaagggcttctaccccagcgacattgccgtggaatgggagagcaatggccagcctgagaacaactacaagacaacccctcctgtgctggacagcgacggctcattcttcctggtgagcaagctgacagtcgacaagtccagatggcagcagggcaacgtgttcagttgcagcgtgatgcacgaggccctgcacaaccactacacccagaagtccctgagcctgtctcctggaaag

SEQ ID NO: 720 - protein, 935 aa, synthetic construct
DVQMTQSPSSLSASVGDRVTITCRASQTIVGYLNWYQQQPGRAPKLLIYAASNLQSGVPPRFSGSGSGTDFTLTISDLQPEDFATYYCQQSYLTPPNTFGQGTKLEIKRTVAAPSVFIFPPSDEQLKSGTASVVCLLNNFYPREAKVQWKVDNALQSGNSQESVTEQDSKDSTYSLSSTLTLSKADYEKHKVYACEVTHQGLSSPVTKSFNRGECGGGGSGGGGSGGGGSEIVLTQSPGTLSLSPGETATLSCRASQSFSSDLAWYQQKPGQAPRLLIYGASSRATGIPDRFSGSGSGTDFTLTISRLEPADFAVYYCQQYGSSPPVTFGGGTKVEIKGGGGSGGSGSGGGGSASGSGEVQLVESGGGLIQPGGSLRLSCAASGVIVSYNYMNWVRQAPGKGLEWVSVIYSGGSTFYADSVRGRFTISRDNSKNTLYLQMNSLRAEDTAVYYCARDLGPAGAFDIWGLGTMVTVSSGGSSGQVQLVQSGAEVKKPGSSVKVSCKVSGGTFSDSAVSWVRQAPGQGLEWMGRIIPIFSTIEYAQNFQGRVTITADESTTTVYMELSYLGLEDTAVYYCARDRPIAVEYTGNWFDPWGQGTLVTVSSASTKGPSVFPLAPSSKSTSGGTAALGCLVKDYFPEPVTVSWNSGALTSGVHTFPAVLQSSGLYSLSSVVTVPSSSLGTQTYICNVNHKPSNTKVDKRVEPKSCDKTHTCPPCPAPEFEGGPSVFLFPPKPKDTLYITREPEVTCVVVDVSHEDPEVKFNWYVDGVEVHNAKTKPREEQYNSTYRVVSVLTVLHQDWLNGKEYKCKVSNKALPASIEKTISKAKGQPREPQVYTLPPCREEMTKNQVSLWCLVKGFYPSDIAVEWESNGQPENNYKTTPPVLDSDGSFFLYSKLTVDKSRWQQGNVFSCSVMHEALHNHYTQKSLSLSPGK

SEQ ID NO: 721 - protein, 955 aa, synthetic construct
SYVLTQPPSVSVAPGQTARITCGGNNIGTKSVHWYQQKPGQAPVLVISSDSDRPSGVPDRFSGSNSGNTATLTISRVEAGDEADYYCHVWDSSSDHWVFGGGTKLTVLRTVAAPSVFIFPPSDEQLKSGTASVVCLLNNFYPREAKVQWKVDNALQSGNSQESVTEQDSKDSTYSLSSTLTLSKADYEKHKVYACEVTHQGLSSPVTKSFNRGECGGGGSGGGGSGGGGSDTVMTQSPLSLPVTPGEPASISCRSSQSLLNSNGYNYLDWYVQKPGQSPQLLIYLGSNRASGVPDRFSGSGSGTDFTLKISRVEAEDVGVYYCMQPLQTPLFTFGPGTKVEIKGGGGSGGSGSGGGGSASGSGQVTLRESGPALVKPTQTLTLTCTFSGFSLSTRGVCVSWIRQPPGKALEWLAFIDWDDDKYYQTSLKTRLTISKDTSKNQVVLTMTNVHPVDTATYYCARISSHHGSSWCTTFDYWGQGALVTVSAGGSSGEVQLVESGGGRVKPGGSLRLSCAASGFTFSSYRMNWVRQAPGKGLEWVSSISSGSSYIYFADSVKGRFTISRDNAKNSLFLRMNNLRVEDTAVYYCARAPTLRHSSGWYDPPGTENSSFDLWGRGTLVTVSSASTKGPSVFPLAPSSKSTSGGTAALGCLVKDYFPEPVTVSWNSGALTSGVHTFPAVLQSSGLYSLSSVVTVPSSSLGTQTYICNVNHKPSNTKVDKRVEPKSCDKTHTCPPCPAPEFEGGPSVFLFPPKPKDTLYITREPEVTCVVVDVSHEDPEVKFNWYVDGVEVHNAKTKPREEQYNSTYRVVSVLTVLHQDWLNGKEYKCKVSNKALPASIEKTISKAKGQPREPQVCTLPPSREEMTKNQVSLSCAVKGFYPSDIAVEWESNGQPENNYKTTPPVLDSDGSFFLVSKLTVDKSRWQQGNVFSCSVMHEALHNHYTQKSLSLSPGK

SEQ ID NO: 722 - DNA, 2805 bp, synthetic construct
  source 1..2805: mol_type = other DNA
gacgtgcagatgacacagagcccttctagcctgtctgccagcgtgggcgacagagtgaccatcacatgtagagccagccagaccatcgtgggctacctgaactggtatcagcagcagcctggcagagcccctaagctgctgatctacgccgccagcaatctgcagtctggcgtgccacctagattttccggctctggcagcggcaccgatttcaccctgacaatcagcgacctgcagcctgaggacttcgccacctactactgccagcagagctacctgacacctcctaacacctttggccagggcaccaagctggaaatcaagcgtacggtggccgctcccagcgtgttcatcttcccacctagcgacgagcagctgaagtccggcacagcctctgtcgtgtgcctgctgaacaacttctacccccgcgaggccaaagtgcagtggaaggtggacaacgccctgcagagcggcaacagccaggaaagcgtgaccgagcaggacagcaaggactccacctacagcctgagcagcaccctgacactgagcaaggccgactacgagaagcacaaggtgtacgcctgcgaagtgacccaccagggcctgtctagccccgtgaccaagagcttcaaccggggcgagtgtggcggcggaggatctggcggaggtggaagcggaggcggtggaagcgagatcgtgctgacacagagccctggcacactgtcactgtctccaggcgaaacagccacactgagctgtagagccagccagagcttcagcagcgacctggcttggtatcagcagaagcctggacaggcccctcggctgttgatctatggcgcctcttctagagccacaggcatccccgatagattcagcggctctggcagcggcaccgatttcaccctgacaatcagcagactggaacccgccgacttcgccgtgtactactgtcagcagtacggcagcagccctcctgtgacatttggcggcggaacaaaggtggaaatcaaaggaggtggtggctctggcggatctgggagtggtggcggaggctctgcttctggatctggagaagtgcagctggtggaatcaggcggcggactgattcaacctggcggctctctgagactgtcttgtgctgcttctggcgtgatcgtgtcctacaactacatgaactgggtccgacaggctcccggcaaaggccttgaatgggtgtccgtgatctacagcggcggcagcaccttttacgccgattctgtgcggggcagattcaccatcagccgggacaacagcaagaacaccctgtacctgcagatgaacagcctgagagccgaggacaccgctgtgtactattgcgccagagatctgggacctgccggcgcttttgatatctggggcctgggcacaatggtcaccgtgtctagcggaggcagctccgggcaggttcagctggttcagtctggcgccgaagtgaagaaacctggcagcagcgtgaaggtgtcctgcaaagtgtctggcggcaccttcagcgatagcgccgtgtcttgggttcgacaggctcctggacaaggcctggaatggatgggcagaatcatccccatcttcagcaccatcgagtacgcccagaacttccagggcagagtgaccatcacagccgacgagagcaccaccaccgtgtacatggaactgagctacctgggcctcgaggacaccgccgtgtactactgtgccagagacagacctatcgccgtcgagtacaccggcaattggttcgatccttggggccagggcacactggtcacagtctcttctgcttcgaccaagggcccatccgtgtttcctctggctcccagcagcaagtctacaagcggaggaacagccgctctgggctgcctggtcaaggattactttcccgagcctgtgaccgtgtcctggaattctggcgctctgacaagcggcgtgcacacctttccagctgtgctgcaaagcagcggcctgtactctctgagcagcgtggtcacagtgcctagctctagcctgggcacccagacctacatctgcaatgtgaaccacaagcctagcaacaccaaggtggacaagagagtggaacccaagagctgcgataagacccacacatgtcctccatgtcctgctccagaattcgaaggcggcccttctgtgttcctgtttcctccaaagcctaaggacaccctgtacatcaccagagaacctgaagtgacctgcgtggtggtggatgtgtctcacgaggaccccgaagtgaagttcaattggtacgtggacggcgtggaagtgcacaacgccaagaccaagcctagagaggaacagtacaacagcacctacagagtggtgtccgtgctgaccgtgctgcaccaggattggctgaacggcaaagagtacaagtgcaaggtgtccaacaaggccctgcctgcttccatcgagaaaaccatcagcaaggccaagggccagcctagggaaccccaggtttacacccttcctccatgtcgggaagagatgaccaagaaccaggtgtccctgtggtgtctggtgaagggcttctaccccagcgacattgccgtggaatgggagagcaatggccagcctgagaacaactacaagacaacccctcctgtgctggacagcgacggctcattcttcctgtacagcaagctgacagtcgacaagtccagatggcagcagggcaacgtgttcagttgcagcgtgatgcacgaggccctgcacaaccactacacccagaagtccctgagcctgtctcctggaaag

SEQ ID NO: 723 - DNA, 2865 bp, synthetic construct
  source 1..2865: mol_type = other DNA
agctacgtgctgacacagcctccatccgtgtctgtggctccaggacagaccgccagaatcacatgcggcggcaacaacatcggcaccaagagcgtgcactggtatcagcagaagcctggacaggcccctgtgctcgtgatcagcagcgatagcgatagacctagcggcgtgcccgatagattcagcggcagcaatagcggcaacaccgccacactgaccatcagcagagttgaggctggcgacgaggccgactactactgtcacgtgtgggatagcagcagcgaccactgggttttcggcggaggcacaaagctgacagtgctgcgtacggtggccgctcccagcgtgttcatcttcccacctagcgacgagcagctgaagtccggcacagcctctgtcgtgtgcctgctgaacaacttctacccccgcgaggccaaagtgcagtggaaggtggacaacgccctgcagagcggcaacagccaggaaagcgtgaccgagcaggacagcaaggactccacctacagcctgagcagcaccctgacactgagcaaggccgactacgagaagcacaaggtgtacgcctgcgaagtgacccaccagggcctgtctagccccgtgaccaagagcttcaaccggggcgagtgtggcggcggaggatctggcggaggtggaagcggaggcggtggaagcgacaccgtgatgacacagagccctctgagcctgcctgtgacacctggcgaacctgccagcatcagctgtagaagcagccagagcctgctgaacagcaacggctacaactacctggattggtacgtgcagaagcccggccagtctcctcagctgctgatctacctgggcagcaatagagccagcggcgtgcccgatagattttctggctctggcagcggcaccgacttcaccctgaagatctctagagtggaagccgaggacgtgggcgtgtactactgtatgcagcctctgcagacccctctgttcacatttggccctggcaccaaggtggaaatcaaaggaggtggtggctctggcggatctgggagtggtggcggaggctctgcttctggatctggacaagtgacactgagagagtctggccccgctctggtcaagcctacacagaccctgacactgacctgcaccttcagcggcttcagcctgtctactagaggcgtgtgcgtgtcctggatcagacagcctcctggaaaggccctggaatggctggccttcatcgactgggacgacgacaagtactaccagaccagcctgaaaacccggctgaccatcagcaaggacaccagcaagaaccaggtggtgctgaccatgaccaacgtgcaccctgtggataccgccacctactactgcgccagaatcagctctcaccacggctccagctggtgtaccaccttcgattattggggccagggcgctctcgtgacagtttctgctggaggcagctccggggaggtgcagctggttgaatctggcggcggaagagtgaagcctggcggatctctgagactgagctgtgccgccagcggcttcaccttcagcagctacagaatgaactgggtccgacaggcccctggcaaaggccttgaatgggtgtccagcatcagcagcggcagctcctacatctacttcgccgacagcgtgaagggcagattcaccatctccagagacaacgccaagaacagcctgttcctgcggatgaacaacctgagagtggaagataccgccgtgtactactgcgccagagcacccacactgagacacagcagcggatggtacgatcctcctggcaccgagaacagcagcttcgatctgtggggcagaggcaccctggtcacagtctcttctgcttcgaccaagggcccatccgtgtttcctctggctcccagcagcaagtctacaagcggaggaacagccgctctgggctgcctggtcaaggattactttcccgagcctgtgaccgtgtcctggaattctggcgctctgacaagcggcgtgcacacctttccagctgtgctgcaaagcagcggcctgtactctctgagcagcgtggtcacagtgcctagctctagcctgggcacccagacctacatctgcaatgtgaaccacaagcctagcaacaccaaggtggacaagagagtggaacccaagagctgcgataagacccacacatgtcctccatgtcctgctccagaattcgaaggcggcccttctgtgttcctgtttcctccaaagcctaaggacaccctgtacatcaccagagaacctgaagtgacctgcgtggtggtggatgtgtctcacgaggaccccgaagtgaagttcaattggtacgtggacggcgtggaagtgcacaacgccaagaccaagcctagagaggaacagtacaacagcacctacagagtggtgtccgtgctgaccgtgctgcaccaggattggctgaacggcaaagagtacaagtgcaaggtgtccaacaaggccctgcctgcttccatcgagaaaaccatcagcaaggccaagggccagcctagggaaccccaggtttgtacccttcctccaagccgggaagagatgaccaagaaccaggtgtccctgagctgtgccgtgaagggcttctaccccagcgacattgccgtggaatgggagagcaatggccagcctgagaacaactacaagacaacccctcctgtgctggacagcgacggctcattcttcctggtgagcaagctgacagtcgacaagtccagatggcagcagggcaacgtgttcagttgcagcgtgatgcacgaggccctgcacaaccactacacccagaagtccctgagcctgtctcctggaaag

SEQ ID NO: 724 - protein, 943 aa, synthetic construct; identical to SEQ ID NO: 632

SEQ ID NO: 725 - protein, 931 aa, synthetic construct
EIVLTQSPGTLSLSPGETATLSCRASQSFSSDLAWYQQKPGQAPRLLIYGASSRATGIPDRFSGSGSGTDFTLTISRLEPADFAVYYCQQYGSSPPVTFGGGTKVEIKRTVAAPSVFIFPPSDEQLKSGTASVVCLLNNFYPREAKVQWKVDNALQSGNSQESVTEQDSKDSTYSLSSTLTLSKADYEKHKVYACEVTHQGLSSPVTKSFNRGECGGGGSGGGGSGGGGSEIVLTQSPATLSVSPGERATLSCRASQSVSSLLAWYQRKPGQPPRLLIYGASTRATGIPARFSGSGSGTEFTLTISSLQSEDFAVYYCQQYNDWWTFGQGTKVEIKGGGGSGGSGSGGGGSASGSGQVHLVQSGAEVKKPGASVKVSCKASGYTFTDYFIHWVRQAPGQGLEWMGWINPDDGDTNYAQKFHGWVAMTRDTSINTAYMELSRLKSNDTAVYYCARGTFSLRGFDWFDPWGQGTLVTVSSGGSSGEVQLVESGGGLIQPGGSLRLSCAASGVIVSYNYMNWVRQAPGKGLEWVSVIYSGGSTFYADSVRGRFTISRDNSKNTLYLQMNSLRAEDTAVYYCARDLGPAGAFDIWGLGTMVTVSSASTKGPSVFPLAPSSKSTSGGTAALGCLVKDYFPEPVTVSWNSGALTSGVHTFPAVLQSSGLYSLSSVVTVPSSSLGTQTYICNVNHKPSNTKVDKRVEPKSCDKTHTCPPCPAPEFEGGPSVFLFPPKPKDTLYITREPEVTCVVVDVSHEDPEVKFNWYVDGVEVHNAKTKPREEQYNSTYRVVSVLTVLHQDWLNGKEYKCKVSNKALPASIEKTISKAKGQPREPQVCTLPPSREEMTKNQVSLSCAVKGFYPSDIAVEWESNGQPENNYKTTPPVLDSDGSFFLVSKLTVDKSRWQQGNVFSCSVMHEALHNHYTQKSLSLSPGK

SEQ ID NO: 726 - DNA, 2829 bp, synthetic construct; identical to SEQ ID NO: 718
  source 1..2829: mol_type = other DNA

SEQ ID NO: 727 - DNA, 2793 bp, synthetic construct
  source 1..2793: mol_type = other DNA
gagatcgtgctgacacagagccctggcacactgtcactgtctccaggcgaaacagccacactgagctgtagagccagccagagcttcagcagcgacctggcttggtatcagcagaagcctggacaggcccctcggctgttgatctatggcgcctcttctagagccacaggcatccccgatagattcagcggctctggcagcggcaccgatttcaccctgacaatcagcagactggaacccgccgacttcgccgtgtactactgtcagcagtacggcagcagccctcctgtgacatttggcggcggaacaaaggtggaaatcaaacgtacggtggccgctcccagcgtgttcatcttcccacctagcgacgagcagctgaagtccggcacagcctctgtcgtgtgcctgctgaacaacttctacccccgcgaggccaaagtgcagtggaaggtggacaacgccctgcagagcggcaacagccaggaaagcgtgaccgagcaggacagcaaggactccacctacagcctgagcagcaccctgacactgagcaaggccgactacgagaagcacaaggtgtacgcctgcgaagtgacccaccagggcctgtctagccccgtgaccaagagcttcaaccggggcgagtgtggcggcggaggatctggcggaggtggaagcggaggcggtggaagcgagatcgtgctgacacagtctcccgccacactgagtgtgtctccaggcgaaagagccacactgtcctgtagagccagccagagcgttagctctctgctggcctggtatcagagaaagcctggccagcctcctcggctgctgatctatggcgcttctacaagagccaccggcattcccgccagattttctggctctggcagcggcaccgagttcaccctgacaatctctagcctgcagagcgaggacttcgccgtgtactactgccagcagtacaacgactggtggacctttggccagggcaccaaggtggaaatcaagggaggtggtggctctggcggatctgggagtggtggcggaggctctgcttctggatctggacaggttcacctggttcagtctggcgccgaagtgaagaaacctggcgcctctgtgaaggtgtcctgcaaggccagcggctacacctttaccgactacttcatccactgggtccgacaggcccctggacaaggacttgaatggatgggctggatcaaccccgacgacggcgataccaattacgcccagaaattccacggctgggtcgccatgaccagagacacctctatcaacaccgcctacatggaactgagccggctgaagtccaacgacaccgccgtgtactattgcgccagaggcacctttagcctgcggggcttcgattggttcgatccttggggacagggcaccctggtcacagtctcttctggaggcagctccggggaagtgcagctggtggaatcaggcggcggactgattcaacctggcggctctctgagactgtcttgtgctgcttctggcgtgatcgtgtcctacaactacatgaactgggtccgacaggctcccggcaaaggccttgaatgggtgtccgtgatctacagcggcggcagcaccttttacgccgattctgtgcggggcagattcaccatcagccgggacaacagcaagaacaccctgtacctgcagatgaacagcctgagagccgaggacaccgctgtgtactattgcgccagagatctgggacctgccggcgcttttgatatctggggcctgggcacaatggtcaccgtgtctagcgcttcgaccaagggcccatccgtgtttcctctggctcccagcagcaagtctacaagcggaggaacagccgctctgggctgcctggtcaaggattactttcccgagcctgtgaccgtgtcctggaattctggcgctctgacaagcggcgtgcacacctttccagctgtgctgcaaagcagcggcctgtactctctgagcagcgtggtcacagtgcctagctctagcctgggcacccagacctacatctgcaatgtgaaccacaagcctagcaacaccaaggtggacaagagagtggaacccaagagctgcgataagacccacacatgtcctccatgtcctgctccagaattcgaaggcggcccttctgtgttcctgtttcctccaaagcctaaggacaccctgtacatcaccagagaacctgaagtgacctgcgtggtggtggatgtgtctcacgaggaccccgaagtgaagttcaattggtacgtggacggcgtggaagtgcacaacgccaagaccaagcctagagaggaacagtacaacagcacctacagagtggtgtccgtgctgaccgtgctgcaccaggattggctgaacggcaaagagtacaagtgcaaggtgtccaacaaggccctgcctgcttccatcgagaaaaccatcagcaaggccaagggccagcctagggaaccccaggtttgtacccttcctccatcccgggaagagatgaccaagaaccaggtgtccctgtcctgtgccgtgaagggcttctaccccagcgacattgccgtggaatgggagagcaatggccagcctgagaacaactacaagacaacccctcctgtgctggacagcgacggctcattcttcctggtgagcaagctgacagtcgacaagtccagatggcagcagggcaacgtgttcagttgcagcgtgatgcacgaggccctgcacaaccactacacccagaagtccctgagcctgtctcctggaaag

SEQ ID NO: 728 - protein, 935 aa, synthetic construct; identical to SEQ ID NO: 720

SEQ ID NO: 729 - protein, 945 aa, synthetic construct
SYVLTQPPSVSVAPGQTARITCGGNNIGTKSVHWYQQKPGQAPVLVISSDSDRPSGVPDRFSGSNSGNTATLTISRVEAGDEADYYCHVWDSSSDHWVFGGGTKLTVLRTVAAPSVFIFPPSDEQLKSGTASVVCLLNNFYPREAKVQWKVDNALQSGNSQESVTEQDSKDSTYSLSSTLTLSKADYEKHKVYACEVTHQGLSSPVTKSFNRGECGGGGSGGGGSGGGGSEIVLTQSPATLSVSPGERATLSCRASQSVSSLLAWYQRKPGQPPRLLIYGASTRATGIPARFSGSGSGTEFTLTISSLQSEDFAVYYCQQYNDWWTFGQGTKVEIKGGGGSGGSGSGGGGSASGSGQVHLVQSGAEVKKPGASVKVSCKASGYTFTDYFIHWVRQAPGQGLEWMGWINPDDGDTNYAQKFHGWVAMTRDTSINTAYMELSRLKSNDTAVYYCARGTFSLRGFDWFDPWGQGTLVTVSSGGSSGEVQLVESGGGRVKPGGSLRLSCAASGFTFSSYRMNWVRQAPGKGLEWVSSISSGSSYIYFADSVKGRFTISRDNAKNSLFLRMNNLRVEDTAVYYCARAPTLRHSSGWYDPPGTENSSFDLWGRGTLVTVSSASTKGPSVFPLAPSSKSTSGGTAALGCLVKDYFPEPVTVSWNSGALTSGVHTFPAVLQSSGLYSLSSVVTVPSSSLGTQTYICNVNHKPSNTKVDKRVEPKSCDKTHTCPPCPAPEFEGGPSVFLFPPKPKDTLYITREPEVTCVVVDVSHEDPEVKFNWYVDGVEVHNAKTKPREEQYNSTYRVVSVLTVLHQDWLNGKEYKCKVSNKALPASIEKTISKAKGQPREPQVCTLPPSREEMTKNQVSLSCAVKGFYPSDIAVEWESNGQPENNYKTTPPVLDSDGSFFLVSKLTVDKSRWQQGNVFSCSVMHEALHNHYTQKSLSLSPGK

SEQ ID NO: 730 - DNA, 2805 bp, synthetic construct; identical to SEQ ID NO: 722
  source 1..2805: mol_type = other DNA

SEQ ID NO: 731 - DNA, 2835 bp, synthetic construct
  source 1..2835: mol_type = other DNA
agctacgtgctgacacagcctccatccgtgtctgtggctccaggacagaccgccagaatcacatgcggcggcaacaacatcggcaccaagagcgtgcactggtatcagcagaagcctggacaggcccctgtgctcgtgatcagcagcgatagcgatagacctagcggcgtgcccgatagattcagcggcagcaatagcggcaacaccgccacactgaccatcagcagagttgaggctggcgacgaggccgactactactgtcacgtgtgggatagcagcagcgaccactgggttttcggcggaggcacaaagctgacagtgctgcgtacggtggccgctcccagcgtgttcatcttcccacctagcgacgagcagctgaagtccggcacagcctctgtcgtgtgcctgctgaacaacttctacccccgcgaggccaaagtgcagtggaaggtggacaacgccctgcagagcggcaacagccaggaaagcgtgaccgagcaggacagcaaggactccacctacagcctgagcagcaccctgacactgagcaaggccgactacgagaagcacaaggtgtacgcctgcgaagtgacccaccagggcctgtctagccccgtgaccaagagcttcaaccggggcgagtgtggcggcggaggatctggcggaggtggaagcggaggcggtggaagcgagatcgtgctgacacagtctcccgccacactgagtgtgtctccaggcgaaagagccacactgtcctgtagagccagccagagcgttagctctctgctggcctggtatcagagaaagcctggccagcctcctcggctgctgatctatggcgcttctacaagagccaccggcattcccgccagattttctggctctggcagcggcaccgagttcaccctgacaatctctagcctgcagagcgaggacttcgccgtgtactactgccagcagtacaacgactggtggacctttggccagggcaccaaggtggaaatcaagggaggtggtggctctggcggatctgggagtggtggcggaggctctgcttctggatctggacaggttcacctggttcagtctggcgccgaagtgaagaaacctggcgcctctgtgaaggtgtcctgcaaggccagcggctacacctttaccgactacttcatccactgggtccgacaggcccctggacaaggacttgaatggatgggctggatcaaccccgacgacggcgataccaattacgcccagaaattccacggctgggtcgccatgaccagagacacctctatcaacaccgcctacatggaactgagccggctgaagtccaacgacaccgccgtgtactattgcgccagaggcacctttagcctgcggggcttcgattggttcgatccttggggacagggcaccctggtcacagtctcttctggaggcagctccggggaggtgcagctggttgaatctggcggcggaagagtgaagcctggcggatctctgagactgagctgtgccgccagcggcttcaccttcagcagctacagaatgaactgggtccgacaggcccctggcaaaggccttgaatgggtgtccagcatcagcagcggcagctcctacatctacttcgccgacagcgtgaagggcagattcaccatctccagagacaacgccaagaacagcctgttcctgcggatgaacaacctgagagtggaagataccgccgtgtactactgcgccagagcacccacactgagacacagcagcggatggtacgatcctcctggcaccgagaacagcagcttcgatctgtggggcagaggcaccctggtcacagtctcttctgcttcgaccaagggcccatccgtgtttcctctggctcccagcagcaagtctacaagcggaggaacagccgctctgggctgcctggtcaaggattactttcccgagcctgtgaccgtgtcctggaattctggcgctctgacaagcggcgtgcacacctttccagctgtgctgcaaagcagcggcctgtactctctgagcagcgtggtcacagtgcctagctctagcctgggcacccagacctacatctgcaatgtgaaccacaagcctagcaacaccaaggtggacaagagagtggaacccaagagctgcgataagacccacacatgtcctccatgtcctgctccagaattcgaaggcggcccttctgtgttcctgtttcctccaaagcctaaggacaccctgtacatcaccagagaacctgaagtgacctgcgtggtggtggatgtgtctcacgaggaccccgaagtgaagttcaattggtacgtggacggcgtggaagtgcacaacgccaagaccaagcctagagaggaacagtacaacagcacctacagagtggtgtccgtgctgaccgtgctgcaccaggattggctgaacggcaaagagtacaagtgcaaggtgtccaacaaggccctgcctgcttccatcgagaaaaccatcagcaaggccaagggccagcctagggaaccccaggtttgtacccttcctccaagccgggaagagatgaccaagaaccaggtgtccctgagctgtgccgtgaagggcttctaccccagcgacattgccgtggaatgggagagcaatggccagcctgagaacaactacaagacaacccctcctgtgctggacagcgacggctcattcttcctggtgagcaagctgacagtcgacaagtccagatggcagcagggcaacgtgttcagttgcagcgtgatgcacgaggccctgcacaaccactacacccagaagtccctgagcctgtctcctggaaag

SEQ ID NO: 732 - protein, 943 aa, synthetic construct; identical to SEQ ID NO: 632

SEQ ID NO: 733 - protein, 931 aa, synthetic construct
EIVLTQSPGTLSLSPGETATLSCRASQSFSSDLAWYQQKPGQAPRLLIYGASSRATGIPDRFSGSGSGTDFTLTISRLEPADFAVYYCQQYGSSPPVTFGGGTKVEIKRTVAAPSVFIFPPSDEQLKSGTASVVCLLNNFYPREAKVQWKVDNALQSGNSQESVTEQDSKDSTYSLSSTLTLSKADYEKHKVYACEVTHQGLSSPVTKSFNRGECGGGGSGGGGSGGGGSEIVLTQSPATLSVSPGERATLSCRASQSVSSLLAWYQRKPGQPPRLLIYGASTRATGIPARFSGSGSGTEFTLTISSLQSEDFAVYYCQQYNDWWTFGQGTKVEIKGGGGSGGSGSGGGGSASGSGQVHLVQSGAEVKKPGASVKVSCKASGYTFTDYFIHWVRQAPGQGLEWMGWINPDDGDTNYAQKFHGWVAMTRDTSINTAYMELSRLKSQDTAVYYCARGTFSLRGFDWFDPWGQGTLVTVSSGGSSGEVQLVESGGGLIQPGGSLRLSCAASGVIVSYNYMNWVRQAPGKGLEWVSVIYSGGSTFYADSVRGRFTISRDNSKNTLYLQMNSLRAEDTAVYYCARDLGPAGAFDIWGLGTMVTVSSASTKGPSVFPLAPSSKSTSGGTAALGCLVKDYFPEPVTVSWNSGALTSGVHTFPAVLQSSGLYSLSSVVTVPSSSLGTQTYICNVNHKPSNTKVDKRVEPKSCDKTHTCPPCPAPEFEGGPSVFLFPPKPKDTLYITREPEVTCVVVDVSHEDPEVKFNWYVDGVEVHNAKTKPREEQYNSTYRVVSVLTVLHQDWLNGKEYKCKVSNKALPASIEKTISKAKGQPREPQVCTLPPSREEMTKNQVSLSCAVKGFYPSDIAVEWESNGQPENNYKTTPPVLDSDGSFFLVSKLTVDKSRWQQGNVFSCSVMHEALHNHYTQKSLSLSPGK

SEQ ID NO: 734 - DNA, 2829 bp, synthetic construct; identical to SEQ ID NO: 718
  source 1..2829: mol_type = other DNA

SEQ ID NO: 735 - DNA, 2793 bp, synthetic construct
  source 1..2793: mol_type = other DNA
gagatcgtgctgacacagagccctggcacactgtcactgtctccaggcgaaacagccacactgagctgtagagccagccagagcttcagcagcgacctggcttggtatcagcagaagcctggacaggcccctcggctgttgatctatggcgcctcttctagagccacaggcatccccgatagattcagcggctctggcagcggcaccgatttcaccctgacaatcagcagactggaacccgccgacttcgccgtgtactactgtcagcagtacggcagcagccctcctgtgacatttggcggcggaacaaaggtggaaatcaaacgtacggtggccgctcccagcgtgttcatcttcccacctagcgacgagcagctgaagtccggcacagcctctgtcgtgtgcctgctgaacaacttctacccccgcgaggccaaagtgcagtggaaggtggacaacgccctgcagagcggcaacagccaggaaagcgtgaccgagcaggacagcaaggactccacctacagcctgagcagcaccctgacactgagcaaggccgactacgagaagcacaaggtgtacgcctgcgaagtgacccaccagggcctgtctagccccgtgaccaagagcttcaaccggggcgagtgtggcggcggaggatctggcggaggtggaagcggaggcggtggaagcgagatcgtgctgacacagtctcccgccacactgagtgtgtctccaggcgaaagagccacactgtcctgtagagccagccagagcgttagctctctgctggcctggtatcagagaaagcctggccagcctcctcggctgctgatctatggcgcttctacaagagccaccggcattcccgccagattttctggctctggcagcggcaccgagttcaccctgacaatctctagcctgcagagcgaggacttcgccgtgtactactgccagcagtacaacgactggtggacctttggccagggcaccaaggtggaaatcaagggaggtggtggctctggcggatctgggagtggtggcggaggctctgcttctggatctggacaggttcacctggttcagtctggcgccgaagtgaagaaacctggcgcctctgtgaaggtgtcctgcaaggccagcggctacacctttaccgactacttcatccactgggtccgacaggcccctggacaaggacttgaatggatgggctggatcaaccccgacgacggcgataccaattacgcccagaaattccacggctgggtcgccatgaccagagacacctctatcaacaccgcctacatggaactgagccggctgaagtctcaggacaccgccgtgtactattgcgccagaggcacctttagcctgcggggcttcgattggttcgatccttggggacagggcaccctggtcacagtctcttctggaggcagctccggggaagtgcagctggtggaatcaggcggcggactgattcaacctggcggctctctgagactgtcttgtgctgcttctggcgtgatcgtgtcctacaactacatgaactgggtccgacaggctcccggcaaaggccttgaatgggtgtccgtgatctacagcggcggcagcaccttttacgccgattctgtgcggggcagattcaccatcagccgggacaacagcaagaacaccctgtacctgcagatgaacagcctgagagccgaggacaccgctgtgtactattgcgccagagatctgggacctgccggcgcttttgatatctggggcctgggcacaatggtcaccgtgtctagcgcttcgaccaagggcccatccgtgtttcctctggctcccagcagcaagtctacaagcggaggaacagccgctctgggctgcctggtcaaggattactttcccgagcctgtgaccgtgtcctggaattctggcgctctgacaagcggcgtgcacacctttccagctgtgctgcaaagcagcggcctgtactctctgagcagcgtggtcacagtgcctagctctagcctgggcacccagacctacatctgcaatgtgaaccacaagcctagcaacaccaaggtggacaagagagtggaacccaagagctgcgataagacccacacatgtcctccatgtcctgctccagaattcgaaggcggcccttctgtgttcctgtttcctccaaagcctaaggacaccctgtacatcaccagagaacctgaagtgacctgcgtggtggtggatgtgtctcacgaggaccccgaagtgaagttcaattggtacgtggacggcgtggaagtgcacaacgccaagaccaagcctagagaggaacagtacaacagcacctacagagtggtgtccgtgctgaccgtgctgcaccaggattggctgaacggcaaagagtacaagtgcaaggtgtccaacaaggccctgcctgcttccatcgagaaaaccatcagcaaggccaagggccagcctagggaaccccaggtttgtacccttcctccatcccgggaagagatgaccaagaaccaggtgtccctgtcctgtgccgtgaagggcttctaccccagcgacattgccgtggaatgggagagcaatggccagcctgagaacaactacaagacaacccctcctgtgctggacagcgacggctcattcttcctggtgagcaagctgacagtcgacaagtccagatggcagcagggcaacgtgttcagttgcagcgtgatgcacgaggccctgcacaaccactacacccagaagtccctgagcctgtctcctggaaag

SEQ ID NO: 736 - protein, 943 aa, synthetic construct
EIVLTQSPGTLSLSPGETATLSCRASQSFSSDLAWYQQKPGQAPRLLIYGASSRATGIPDRFSGSGSGTDFTLTISRLEPADFAVYYCQQYGSSPPVTFGGGTKVEIKRTVAAPSVFIFPPSDEQLKSGTASVVCLLNNFYPREAKVQWKVDNALQSGNSQESVTEQDSKDSTYSLSSTLTLSKADYEKHKVYACEVTHQGLSSPVTKSFNRGECGGGGSGGGGSGGGGSSYVLTQPPSVSVAPGQTARITCGGNNIGTKSVHWYQQKPGQAPVLVISSDSDRPSGVPDRFSGSNSGNTATLTISRVEAGDEADYYCHVWDSSSDHWVFGGGTKLTVLGGGGSGGSGSGGGGSASGSGEVQLVESGGGRVKPGGSLRLSCAASGFTFSSYRMNWVRQAPGKGLEWVSSISSGSSYIYFADSVKGRFTISRDNAKNSLFLRMNNLRVEDTAVYYCARAPTLRHSSGWYDPPGTEQSSFDLWGRGTLVTVSSGGSSGEVQLVESGGGLIQPGGSLRLSCAASGVIVSYNYMNWVRQAPGKGLEWVSVIYSGGSTFYADSVRGRFTISRDNSKNTLYLQMNSLRAEDTAVYYCARDLGPAGAFDIWGLGTMVTVSSASTKGPSVFPLAPSSKSTSGGTAALGCLVKDYFPEPVTVSWNSGALTSGVHTFPAVLQSSGLYSLSSVVTVPSSSLGTQTYICNVNHKPSNTKVDKRVEPKSCDKTHTCPPCPAPEFEGGPSVFLFPPKPKDTLYITREPEVTCVVVDVSHEDPEVKFNWYVDGVEVHNAKTKPREEQYNSTYRVVSVLTVLHQDWLNGKEYKCKVSNKALPASIEKTISKAKGQPREPQVYTLPPCREEMTKNQVSLWCLVKGFYPSDIAVEWESNGQPENNYKTTPPVLDSDGSFFLYSKLTVDKSRWQQGNVFSCSVMHEALHNHYTQKSLSLSPGK

SEQ ID NO: 737 - protein, 931 aa, synthetic construct; identical to SEQ ID NO: 733

SEQ ID NO: 738 - DNA, 2829 bp, synthetic construct
  source 1..2829: mol_type = other DNA
gagatcgtgctgacacagagccctggcacactgtcactgtctccaggcgaaacagccacactgagctgtagagccagccagagcttcagcagcgacctggcttggtatcagcagaagcctggacaggcccctcggctgttgatctatggcgcctcttctagagccacaggcatccccgatagattcagcggctctggcagcggcaccgatttcaccctgacaatcagcagactggaacccgccgacttcgccgtgtactactgtcagcagtacggcagcagccctcctgtgacatttggcggcggaacaaaggtggaaatcaaacgtacggtggccgctcccagcgtgttcatcttcccacctagcgacgagcagctgaagtccggcacagcctctgtcgtgtgcctgctgaacaacttctacccccgcgaggccaaagtgcagtggaaggtggacaacgccctgcagagcggcaacagccaggaaagcgtgaccgagcaggacagcaaggactccacctacagcctgagcagcaccctgacactgagcaaggccgactacgagaagcacaaggtgtacgcctgcgaagtgacccaccagggcctgtctagccccgtgaccaagagcttcaaccggggcgagtgtggcggcggaggatctggcggaggtggaagcggaggcggtggaagcagctacgtgctgacacagcctccatccgtgtctgtggctccaggacagaccgccagaatcacatgcggcggcaacaacatcggcaccaagagcgtgcactggtatcagcagaagcctggacaggcccctgtgctcgtgatcagcagcgatagcgatagacctagcggcgtgcccgatagattcagcggcagcaatagcggcaacaccgccacactgaccatcagcagagttgaggctggcgacgaggccgactactactgtcacgtgtgggatagcagcagcgaccactgggttttcggcggaggcacaaagctgacagtgctgggaggtggtggctctggcggatctgggagtggtggcggaggctctgcttctggatctggagaggtgcagctggttgaatctggcggcggaagagtgaagcctggcggatctctgagactgagctgtgccgccagcggcttcaccttcagcagctacagaatgaactgggtccgacaggcccctggcaaaggccttgaatgggtgtccagcatcagcagcggcagctcctacatctacttcgccgacagcgtgaagggcagattcaccatctccagagacaacgccaagaacagcctgttcctgcggatgaacaacctgagagtggaagataccgccgtgtactactgcgccagagcacccacactgagacacagcagcggatggtacgatcctcctggcaccgagcaaagcagcttcgatctgtggggcagaggcaccctggtcacagtctcttctggaggcagctccggggaagtgcagctggtggaatcaggcggcggactgattcaacctggcggctctctgagactgtcttgtgctgcttctggcgtgatcgtgtcctacaactacatgaactgggtccgacaggctcccggcaaaggccttgaatgggtgtccgtgatctacagcggcggcagcaccttttacgccgattctgtgcggggcagattcaccatcagccgggacaacagcaagaacaccctgtacctgcagatgaacagcctgagagccgaggacaccgctgtgtactattgcgccagagatctgggacctgccggcgcttttgatatctggggcctgggcacaatggtcaccgtgtctagcgcttcgaccaagggcccatccgtgtttcctctggctcccagcagcaagtctacaagcggaggaacagccgctctgggctgcctggtcaaggattactttcccgagcctgtgaccgtgtcctggaattctggcgctctgacaagcggcgtgcacacctttccagctgtgctgcaaagcagcggcctgtactctctgagcagcgtggtcacagtgcctagctctagcctgggcacccagacctacatctgcaatgtgaaccacaagcctagcaacaccaaggtggacaagagagtggaacccaagagctgcgataagacccacacatgtcctccatgtcctgctccagaattcgaaggcggcccttctgtgttcctgtttcctccaaagcctaaggacaccctgtacatcaccagagaacctgaagtgacctgcgtggtggtggatgtgtctcacgaggaccccgaagtgaagttcaattggtacgtggacggcgtggaagtgcacaacgccaagaccaagcctagagaggaacagtacaacagcacctacagagtggtgtccgtgctgaccgtgctgcaccaggattggctgaacggcaaagagtacaagtgcaaggtgtccaacaaggccctgcctgcttccatcgagaaaaccatcagcaaggccaagggccagcctagggaaccccaggtttacacccttcctccatgtcgggaagagatgaccaagaaccaggtgtccctgtggtgtctggtgaagggcttctaccccagcgacattgccgtggaatgggagagcaatggccagcctgagaacaactacaagacaacccctcctgtgctggacagcgacggctcattcttcctgtacagcaagctgacagtcgacaagtccagatggcagcagggcaacgtgttcagttgcagcgtgatgcacgaggccctgcacaaccactacacccagaagtccctgagcctgtctcctggaaag

SEQ ID NO: 739 - DNA, 2793 bp, unidentified; identical to SEQ ID NO: 735
  source 1..2793: mol_type = other DNA

SEQ ID NO: 740 - protein, 935 aa, synthetic construct; identical to SEQ ID NO: 720

SEQ ID NO: 741 - protein, 945 aa, synthetic construct
SYVLTQPPSVSVAPGQTARITCGGNNIGTKSVHWYQQKPGQAPVLVISSDSDRPSGVPDRFSGSNSGNTATLTISRVEAGDEADYYCHVWDSSSDHWVFGGGTKLTVLRTVAAPSVFIFPPSDEQLKSGTASVVCLLNNFYPREAKVQWKVDNALQSGNSQESVTEQDSKDSTYSLSSTLTLSKADYEKHKVYACEVTHQGLSSPVTKSFNRGECGGGGSGGGGSGGGGSEIVLTQSPATLSVSPGERATLSCRASQSVSSLLAWYQRKPGQPPRLLIYGASTRATGIPARFSGSGSGTEFTLTISSLQSEDFAVYYCQQYNDWWTFGQGTKVEIKGGGGSGGSGSGGGGSASGSGQVHLVQSGAEVKKPGASVKVSCKASGYTFTDYFIHWVRQAPGQGLEWMGWINPDDGDTNYAQKFHGWVAMTRDTSINTAYMELSRLKSQDTAVYYCARGTFSLRGFDWFDPWGQGTLVTVSSGGSSGEVQLVESGGGRVKPGGSLRLSCAASGFTFSSYRMNWVRQAPGKGLEWVSSISSGSSYIYFADSVKGRFTISRDNAKNSLFLRMNNLRVEDTAVYYCARAPTLRHSSGWYDPPGTENSSFDLWGRGTLVTVSSASTKGPSVFPLAPSSKSTSGGTAALGCLVKDYFPEPVTVSWNSGALTSGVHTFPAVLQSSGLYSLSSVVTVPSSSLGTQTYICNVNHKPSNTKVDKRVEPKSCDKTHTCPPCPAPEFEGGPSVFLFPPKPKDTLYITREPEVTCVVVDVSHEDPEVKFNWYVDGVEVHNAKTKPREEQYNSTYRVVSVLTVLHQDWLNGKEYKCKVSNKALPASIEKTISKAKGQPREPQVCTLPPSREEMTKNQVSLSCAVKGFYPSDIAVEWESNGQPENNYKTTPPVLDSDGSFFLVSKLTVDKSRWQQGNVFSCSVMHEALHNHYTQKSLSLSPGK

SEQ ID NO: 742 - DNA, 2805 bp, synthetic construct; identical to SEQ ID NO: 722
  source 1..2805: mol_type = other DNA

SEQ ID NO: 743 - DNA, 2835 bp, synthetic construct
  source 1..2835: mol_type = other DNA
agctacgtgctgacacagcctccatccgtgtctgtggctccaggacagaccgccagaatcacatgcggcggcaacaacatcggcaccaagagcgtgcactggtatcagcagaagcctggacaggcccctgtgctcgtgatcagcagcgatagcgatagacctagcggcgtgcccgatagattcagcggcagcaatagcggcaacaccgccacactgaccatcagcagagttgaggctggcgacgaggccgactactactgtcacgtgtgggatagcagcagcgaccactgggttttcggcggaggcacaaagctgacagtgctgcgtacggtggccgctcccagcgtgttcatcttcccacctagcgacgagcagctgaagtccggcacagcctctgtcgtgtgcctgctgaacaacttctacccccgcgaggccaaagtgcagtggaaggtggacaacgccctgcagagcggcaacagccaggaaagcgtgaccgagcaggacagcaaggactccacctacagcctgagcagcaccctgacactgagcaaggccgactacgagaagcacaaggtgtacgcctgcgaagtgacccaccagggcctgtctagccccgtgaccaagagcttcaaccggggcgagtgtggcggcggaggatctggcggaggtggaagcggaggcggtggaagcgagatcgtgctgacacagtctcccgccacactgagtgtgtctccaggcgaaagagccacactgtcctgtagagccagccagagcgttagctctctgctggcctggtatcagagaaagcctggccagcctcctcggctgctgatctatggcgcttctacaagagccaccggcattcccgccagattttctggctctggcagcggcaccgagttcaccctgacaatctctagcctgcagagcgaggacttcgccgtgtactactgccagcagtacaacgactggtggacctttggccagggcaccaaggtggaaatcaagggaggtggtggctctggcggatctgggagtggtggcggaggctctgcttctggatctggacaggttcacctggttcagtctggcgccgaagtgaagaaacctggcgcctctgtgaaggtgtcctgcaaggccagcggctacacctttaccgactacttcatccactgggtccgacaggcccctggacaaggacttgaatggatgggctggatcaaccccgacgacggcgataccaattacgcccagaaattccacggctgggtcgccatgaccagagacacctctatcaacaccgcctacatggaactgagccggctgaagtctcaggacaccgccgtgtactattgcgccagaggcacctttagcctgcggggcttcgattggttcgatccttggggacagggcaccctggtcacagtctcttctggaggcagctccggggaggtgcagctggttgaatctggcggcggaagagtgaagcctggcggatctctgagactgagctgtgccgccagcggcttcaccttcagcagctacagaatgaactgggtccgacaggcccctggcaaaggccttgaatgggtgtccagcatcagcagcggcagctcctacatctacttcgccgacagcgtgaagggcagattcaccatctccagagacaacgccaagaacagcctgttcctgcggatgaacaacctgagagtggaagataccgccgtgtactactgcgccagagcacccacactgagacacagcagcggatggtacgatcctcctggcaccgagaacagcagcttcgatctgtggggcagaggcaccctggtcacagtctcttctgcttcgaccaagggcccatccgtgtttcctctggctcccagcagcaagtctacaagcggaggaacagccgctctgggctgcctggtcaaggattactttcccgagcctgtgaccgtgtcctggaattctggcgctctgacaagcggcgtgcacacctttccagctgtgctgcaaagcagcggcctgtactctctgagcagcgtggtcacagtgcctagctctagcctgggcacccagacctacatctgcaatgtgaaccacaagcctagcaacaccaaggtggacaagagagtggaacccaagagctgcgataagacccacacatgtcctccatgtcctgctccagaattcgaaggcggcccttctgtgttcctgtttcctccaaagcctaaggacaccctgtacatcaccagagaacctgaagtgacctgcgtggtggtggatgtgtctcacgaggaccccgaagtgaagttcaattggtacgtggacggcgtggaagtgcacaacgccaagaccaagcctagagaggaacagtacaacagcacctacagagtggtgtccgtgctgaccgtgctgcaccaggattggctgaacggcaaagagtacaagtgcaaggtgtccaacaaggccctgcctgcttccatcgagaaaaccatcagcaaggccaagggccagcctagggaaccccaggtttgtacccttcctccaagccgggaagagatgaccaagaaccaggtgtccctgagctgtgccgtgaagggcttctaccccagcgacattgccgtggaatgggagagcaatggccagcctgagaacaactacaagacaacccctcctgtgctggacagcgacggctcattcttcctggtgagcaagctgacagtcgacaagtccagatggcagcagggcaacgtgttcagttgcagcgtgatgcacgaggccctgcacaaccactacacccagaagtccctgagcctgtctcctggaaag

SEQ ID NO: 744 - protein, 935 aa, synthetic construct; identical to SEQ ID NO: 720

SEQ ID NO: 745 - protein, 945 aa, synthetic construct
SYVLTQPPSVSVAPGQTARITCGGNNIGTKSVHWYQQKPGQAPVLVISSDSDRPSGVPDRFSGSNSGNTATLTISRVEAGDEADYYCHVWDSSSDHWVFGGGTKLTVLRTVAAPSVFIFPPSDEQLKSGTASVVCLLNNFYPREAKVQWKVDNALQSGNSQESVTEQDSKDSTYSLSSTLTLSKADYEKHKVYACEVTHQGLSSPVTKSFNRGECGGGGSGGGGSGGGGSEIVLTQSPATLSVSPGERATLSCRASQSVSSLLAWYQRKPGQPPRLLIYGASTRATGIPARFSGSGSGTEFTLTISSLQSEDFAVYYCQQYNDWWTFGQGTKVEIKGGGGSGGSGSGGGGSASGSGQVHLVQSGAEVKKPGASVKVSCKASGYTFTDYFIHWVRQAPGQGLEWMGWINPDDGDTNYAQKFHGWVAMTRDTSINTAYMELSRLKSQDTAVYYCARGTFSLRGFDWFDPWGQGTLVTVSSGGSSGEVQLVESGGGRVKPGGSLRLSCAASGFTFSSYRMNWVRQAPGKGLEWVSSISSGSSYIYFADSVKGRFTISRDNAKNSLFLRMNNLRVEDTAVYYCARAPTLRHSSGWYDPPGTEQSSFDLWGRGTLVTVSSASTKGPSVFPLAPSSKSTSGGTAALGCLVKDYFPEPVTVSWNSGALTSGVHTFPAVLQSSGLYSLSSVVTVPSSSLGTQTYICNVNHKPSNTKVDKRVEPKSCDKTHTCPPCPAPEFEGGPSVFLFPPKPKDTLYITREPEVTCVVVDVSHEDPEVKFNWYVDGVEVHNAKTKPREEQYNSTYRVVSVLTVLHQDWLNGKEYKCKVSNKALPASIEKTISKAKGQPREPQVCTLPPSREEMTKNQVSLSCAVKGFYPSDIAVEWESNGQPENNYKTTPPVLDSDGSFFLVSKLTVDKSRWQQGNVFSCSVMHEALHNHYTQKSLSLSPGK

SEQ ID NO: 746 - DNA, 2805 bp, synthetic construct; identical to SEQ ID NO: 722
  source 1..2805: mol_type = other DNA

SEQ ID NO: 747 - DNA, 2835 bp, synthetic construct
  source 1..2835: mol_type = other DNA
agctacgtgctgacacagcctccatccgtgtctgtggctccaggacagaccgccagaatcacatgcggcggcaacaacatcggcaccaagagcgtgcactggtatcagcagaagcctggacaggcccctgtgctcgtgatcagcagcgatagcgatagacctagcggcgtgcccgatagattcagcggcagcaatagcggcaacaccgccacactgaccatcagcagagttgaggctggcgacgaggccgactactactgtcacgtgtgggatagcagcagcgaccactgggttttcggcggaggcacaaagctgacagtgctgcgtacggtggccgctcccagcgtgttcatcttcccacctagcgacgagcagctgaagtccggcacagcctctgtcgtgtgcctgctgaacaacttctacccccgcgaggccaaagtgcagtggaaggtggacaacgccctgcagagcggcaacagccaggaaagcgtgaccgagcaggacagcaaggactccacctacagcctgagcagcaccctgacactgagcaaggccgactacgagaagcacaaggtgtacgcctgcgaagtgacccaccagggcctgtctagccccgtgaccaagagcttcaaccggggcgagtgtggcggcggaggatctggcggaggtggaagcggaggcggtggaagcgagatcgtgctgacacagtctcccgccacactgagtgtgtctccaggcgaaagagccacactgtcctgtagagccagccagagcgttagctctctgctggcctggtatcagagaaagcctggccagcctcctcggctgctgatctatggcgcttctacaagagccaccggcattcccgccagattttctggctctggcagcggcaccgagttcaccctgacaatctctagcctgcagagcgaggacttcgccgtgtactactgccagcagtacaacgactggtggacctttggccagggcaccaaggtggaaatcaagggaggtggtggctctggcggatctgggagtggtggcggaggctctgcttctggatctggacaggttcacctggttcagtctggcgccgaagtgaagaaacctggcgcctctgtgaaggtgtcctgcaaggccagcggctacacctttaccgactacttcatccactgggtccgacaggcccctggacaaggacttgaatggatgggctggatcaaccccgacgacggcgataccaattacgcccagaaattccacggctgggtcgccatgaccagagacacctctatcaacaccgcctacatggaactgagccggctgaagtctcaggacaccgccgtgtactattgcgccagaggcacctttagcctgcggggcttcgattggttcgatccttggggacagggcaccctggtcacagtctcttctggaggcagctccggggaggtgcagctggttgaatctggcggcggaagagtgaagcctggcggatctctgagactgagctgtgccgccagcggcttcaccttcagcagctacagaatgaactgggtccgacaggcccctggcaaaggccttgaatgggtgtccagcatcagcagcggcagctcctacatctacttcgccgacagcgtgaagggcagattcaccatctccagagacaacgccaagaacagcctgttcctgcggatgaacaacctgagagtggaagataccgccgtgtactactgcgccagagcacccacactgagacacagcagcggatggtacgatcctcctggcaccgagcaaagcagcttcgatctgtggggcagaggcaccctggtcacagtctcttctgcttcgaccaagggcccatccgtgtttcctctggctcccagcagcaagtctacaagcggaggaacagccgctctgggctgcctggtcaaggattactttcccgagcctgtgaccgtgtcctggaattctggcgctctgacaagcggcgtgcacacctttccagctgtgctgcaaagcagcggcctgtactctctgagcagcgtggtcacagtgcctagctctagcctgggcacccagacctacatctgcaatgtgaaccacaagcctagcaacaccaaggtggacaagagagtggaacccaagagctgcgataagacccacacatgtcctccatgtcctgctccagaattcgaaggcggcccttctgtgttcctgtttcctccaaagcctaaggacaccctgtacatcaccagagaacctgaagtgacctgcgtggtggtggatgtgtctcacgaggaccccgaagtgaagttcaattggtacgtggacggcgtggaagtgcacaacgccaagaccaagcctagagaggaacagtacaacagcacctacagagtggtgtccgtgctgaccgtgctgcaccaggattggctgaacggcaaagagtacaagtgcaaggtgtccaacaaggccctgcctgcttccatcgagaaaaccatcagcaaggccaagggccagcctagggaaccccaggtttgtacccttcctccaagccgggaagagatgaccaagaaccaggtgtccctgagctgtgccgtgaagggcttctaccccagcgacattgccgtggaatgggagagcaatggccagcctgagaacaactacaagacaacccctcctgtgctggacagcgacggctcattcttcctggtgagcaagctgacagtcgacaagtccagatggcagcagggcaacgtgttcagttgcagcgtgatgcacgaggccctgcacaaccactacacccagaagtccctgagcctgtctcctggaaag

SEQ ID NO: 748 - protein, 935 aa, synthetic construct; identical to SEQ ID NO: 720

SEQ ID NO: 749 - protein, 955 aa, synthetic construct
DTVMTQSPLSLPVTPGEPASISCRSSQSLLNSNGYNYLDWYVQKPGQSPQLLIYLGSNRASGVPDRFSGSGSGTDFTLKISRVEAEDVGVYYCMQPLQTPLFTFGPGTKVEIKRTVAAPSVFIFPPSDEQLKSGTASVVCLLNNFYPREAKVQWKVDNALQSGNSQESVTEQDSKDSTYSLSSTLTLSKADYEKHKVYACEVTHQGLSSPVTKSFNRGECGGGGSGGGGSGGGGSSYVLTQPPSVSVAPGQTARITCGGNNIGTKSVHWYQQKPGQAPVLVISSDSDRPSGVPDRFSGSNSGNTATLTISRVEAGDEADYYCHVWDSSSDHWVFGGGTKLTVLGGGGSGGSGSGGGGSASGSGEVQLVESGGGRVKPGGSLRLSCAASGFTFSSYRMNWVRQAPGKGLEWVSSISSGSSYIYFADSVKGRFTISRDNAKNSLFLRMNNLRVEDTAVYYCARAPTLRHSSGWYDPPGTENSSFDLWGRGTLVTVSSGGSSGQVTLRESGPALVKPTQTLTLTCTFSGFSLSTRGVCVSWIRQPPGKALEWLAFIDWDDDKYYQTSLKTRLTISKDTSKNQVVLTMTNVHPVDTATYYCARISSHHGSSWCTTFDYWGQGALVTVSAASTKGPSVFPLAPSSKSTSGGTAALGCLVKDYFPEPVTVSWNSGALTSGVHTFPAVLQSSGLYSLSSVVTVPSSSLGTQTYICNVNHKPSNTKVDKRVEPKSCDKTHTCPPCPAPEFEGGPSVFLFPPKPKDTLYITREPEVTCVVVDVSHEDPEVKFNWYVDGVEVHNAKTKPREEQYNSTYRVVSVLTVLHQDWLNGKEYKCKVSNKALPASIEKTISKAKGQPREPQVCTLPPSREEMTKNQVSLSCAVKGFYPSDIAVEWESNGQPENNYKTTPPVLDSDGSFFLVSKLTVDKSRWQQGNVFSCSVMHEALHNHYTQKSLSLSPGK

SEQ ID NO: 750 - DNA, 2805 bp, synthetic construct; identical to SEQ ID NO: 722
  source 1..2805: mol_type = other DNA

SEQ ID NO: 751 - DNA, 2865 bp, synthetic construct
  source 1..2865: mol_type = other DNA
gacaccgtgatgacacagagccctctgagcctgcctgtgacacctggcgaacctgccagcatcagctgtagaagcagccagagcctgctgaacagcaacggctacaactacctggattggtacgtgcagaagcccggccagtctcctcagctgctgatctacctgggcagcaatagagccagcggcgtgcccgatagattttctggctctggcagcggcaccgacttcaccctgaagatctctagagtggaagccgaggacgtgggcgtgtactactgtatgcagcctctgcagacccctctgttcacatttggccctggcaccaaggtggaaatcaaacgtacggtggccgctcccagcgtgttcatcttcccacctagcgacgagcagctgaagtccggcacagcctctgtcgtgtgcctgctgaacaacttctacccccgcgaggccaaagtgcagtggaaggtggacaacgccctgcagagcggcaacagccaggaaagcgtgaccgagcaggacagcaaggactccacctacagcctgagcagcaccctgacactgagcaaggccgactacgagaagcacaaggtgtacgcctgcgaagtgacccaccagggcctgtctagccccgtgaccaagagcttcaaccggggcgagtgtggcggcggaggatctggcggaggtggaagcggaggcggtggaagcagctacgtgctgacacagcctccatccgtgtctgtggctccaggacagaccgccagaatcacatgcggcggcaacaacatcggcaccaagagcgtgcactggtatcagcagaagcctggacaggcccctgtgctcgtgatcagcagcgatagcgatagacctagcggcgtgcccgatagattcagcggcagcaatagcggcaacaccgccacactgaccatcagcagagttgaggctggcgacgaggccgactactactgtcacgtgtgggatagcagcagcgaccactgggttttcggcggaggcacaaagctgacagtgctgggaggtggtggctctggcggatctgggagtggtggcggaggctctgcttctggatctggagaggtgcagctggttgaatctggcggcggaagagtgaagcctggcggatctctgagactgagctgtgccgccagcggcttcaccttcagcagctacagaatgaactgggtccgacaggcccctggcaaaggccttgaatgggtgtccagcatcagcagcggcagctcctacatctacttcgccgacagcgtgaagggcagattcaccatctccagagacaacgccaagaacagcctgttcctgcggatgaacaacctgagagtggaagataccgccgtgtactactgcgccagagcacccacactgagacacagcagcggatggtacgatcctcctggcaccgagaacagcagcttcgatctgtggggcagaggcaccctggtcacagtctcttctggaggcagctccgggcaagtgacactgagagagtctggccccgctctggtcaagcctacacagaccctgacactgacctgcaccttcagcggcttcagcctgtctactagaggcgtgtgcgtgtcctggatcagacagcctcctggaaaggccctggaatggctggccttcatcgactgggacgacgacaagtactaccagaccagcctgaaaacccggctgaccatcagcaaggacaccagcaagaaccaggtggtgctgaccatgaccaacgtgcaccctgtggataccgccacctactactgcgccagaatcagctctcaccacggctccagctggtgtaccaccttcgattattggggccagggcgctctcgtgacagtttctgctgcttcgaccaagggcccatccgtgtttcctctggctcccagcagcaagtctacaagcggaggaacagccgctctgggctgcctggtcaaggattactttcccgagcctgtgaccgtgtcctggaattctggcgctctgacaagcggcgtgcacacctttccagctgtgctgcaaagcagcggcctgtactctctgagcagcgtggtcacagtgcctagctctagcctgggcacccagacctacatctgcaatgtgaaccacaagcctagcaacaccaaggtggacaagagagtggaacccaagagctgcgataagacccacacatgtcctccatgtcctgctccagaattcgaaggcggcccttctgtgttcctgtttcctccaaagcctaaggacaccctgtacatcaccagagaacctgaagtgacctgcgtggtggtggatgtgtctcacgaggaccccgaagtgaagttcaattggtacgtggacggcgtggaagtgcacaacgccaagaccaagcctagagaggaacagtacaacagcacctacagagtggtgtccgtgctgaccgtgctgcaccaggattggctgaacggcaaagagtacaagtgcaaggtgtccaacaaggccctgcctgcttccatcgagaaaaccatcagcaaggccaagggccagcctagggaaccccaggtttgtacccttcctccaagccgggaagagatgaccaagaaccaggtgtccctgagctgtgccgtgaagggcttctaccccagcgacattgccgtggaatgggagagcaatggccagcctgagaacaactacaagacaacccctcctgtgctggacagcgacggctcattcttcctggtgagcaagctgacagtcgacaagtccagatggcagcagggcaacgtgttcagttgcagcgtgatgcacgaggccctgcacaaccactacacccagaagtccctgagcctgtctcctggaaag

SEQ ID NO: 752 - protein, 935 aa, synthetic construct; identical to SEQ ID NO: 720

SEQ ID NO: 753 - protein, 945 aa, synthetic construct
EIVLTQSPATLSVSPGERATLSCRASQSVSSLLAWYQRKPGQPPRLLIYGASTRATGIPARFSGSGSGTEFTLTISSLQSEDFAVYYCQQYNDWWTFGQGTKVEIKRTVAAPSVFIFPPSDEQLKSGTASVVCLLNNFYPREAKVQWKVDNALQSGNSQESVTEQDSKDSTYSLSSTLTLSKADYEKHKVYACEVTHQGLSSPVTKSFNRGECGGGGSGGGGSGGGGSSYVLTQPPSVSVAPGQTARITCGGNNIGTKSVHWYQQKPGQAPVLVISSDSDRPSGVPDRFSGSNSGNTATLTISRVEAGDEADYYCHVWDSSSDHWVFGGGTKLTVLGGGGSGGSGSGGGGSASGSGEVQLVESGGGRVKPGGSLRLSCAASGFTFSSYRMNWVRQAPGKGLEWVSSISSGSSYIYFADSVKGRFTISRDNAKNSLFLRMNNLRVEDTAVYYCARAPTLRHSSGWYDPPGTENSSFDLWGRGTLVTVSSGGSSGQVHLVQSGAEVKKPGASVKVSCKASGYTFTDYFIHWVRQAPGQGLEWMGWINPDDGDTNYAQKFHGWVAMTRDTSINTAYMELSRLKSNDTAVYYCARGTFSLRGFDWFDPWGQGTLVTVSSASTKGPSVFPLAPSSKSTSGGTAALGCLVKDYFPEPVTVSWNSGALTSGVHTFPAVLQSSGLYSLSSVVTVPSSSLGTQTYICNVNHKPSNTKVDKRVEPKSCDKTHTCPPCPAPEFEGGPSVFLFPPKPKDTLYITREPEVTCVVVDVSHEDPEVKFNWYVDGVEVHNAKTKPREEQYNSTYRVVSVLTVLHQDWLNGKEYKCKVSNKALPASIEKTISKAKGQPREPQVCTLPPSREEMTKNQVSLSCAVKGFYPSDIAVEWESNGQPENNYKTTPPVLDSDGSFFLVSKLTVDKSRWQQGNVFSCSVMHEALHNHYTQKSLSLSPGK

SEQ ID NO: 754 - DNA, 2805 bp, synthetic construct; identical to SEQ ID NO: 722
  source 1..2805: mol_type = other DNA

SEQ ID NO: 755 - DNA, 2835 bp, synthetic construct
  source 1..2835: mol_type = other DNA
gagatcgtgctgacacagtctcccgccacactgagtgtgtctccaggcgaaagagccacactgtcctgtagagccagccagagcgttagctctctgctggcctggtatcagagaaagcctggccagcctcctcggctgctgatctatggcgcttctacaagagccaccggcattcccgccagattttctggctctggcagcggcaccgagttcaccctgacaatctctagcctgcagagcgaggacttcgccgtgtactactgccagcagtacaacgactggtggacctttggccagggcaccaaggtggaaatcaagcgtacggtggccgctcccagcgtgttcatcttcccacctagcgacgagcagctgaagtccggcacagcctctgtcgtgtgcctgctgaacaacttctacccccgcgaggccaaagtgcagtggaaggtggacaacgccctgcagagcggcaacagccaggaaagcgtgaccgagcaggacagcaaggactccacctacagcctgagcagcaccctgacactgagcaaggccgactacgagaagcacaaggtgtacgcctgcgaagtgacccaccagggcctgtctagccccgtgaccaagagcttcaaccggggcgagtgtggcggcggaggatctggcggaggtggaagcggaggcggtggaagcagctacgtgctgacacagcctccatccgtgtctgtggctccaggacagaccgccagaatcacatgcggcggcaacaacatcggcaccaagagcgtgcactggtatcagcagaagcctggacaggcccctgtgctcgtgatcagcagcgatagcgatagacctagcggcgtgcccgatagattcagcggcagcaatagcggcaacaccgccacactgaccatcagcagagttgaggctggcgacgaggccgactactactgtcacgtgtgggatagcagcagcgaccactgggttttcggcggaggcacaaagctgacagtgctgggaggtggtggctctggcggatctgggagtggtggcggaggctctgcttctggatctggagaggtgcagctggttgaatctggcggcggaagagtgaagcctggcggatctctgagactgagctgtgccgccagcggcttcaccttcagcagctacagaatgaactgggtccgacaggcccctggcaaaggccttgaatgggtgtccagcatcagcagcggcagctcctacatctacttcgccgacagcgtgaagggcagattcaccatctccagagacaacgccaagaacagcctgttcctgcggatgaacaacctgagagtggaagataccgccgtgtactactgcgccagagcacccacactgagacacagcagcggatggtacgatcctcctggcaccgagaacagcagcttcgatctgtggggcagaggcaccctggtcacagtctcttctggaggcagctccgggcaggttcacctggttcagtctggcgccgaagtgaagaaacctggcgcctctgtgaaggtgtcctgcaaggccagcggctacacctttaccgactacttcatccactgggtccgacaggcccctggacaaggacttgaatggatgggctggatcaaccccgacgacggcgataccaattacgcccagaaattccacggctgggtcgccatgaccagagacacctctatcaacaccgcctacatggaactgagccggctgaagtccaacgacaccgccgtgtactattgcgccagaggcacctttagcctgcggggcttcgattggttcgatccttggggacagggcaccctggtcacagtctcttctgcttcgaccaagggcccatccgtgtttcctctggctcccagcagcaagtctacaagcggaggaacagccgctctgggctgcctggtcaaggattactttcccgagcctgtgaccgtgtcctggaattctggcgctctgacaagcggcgtgcacacctttccagctgtgctgcaaagcagcggcctgtactctctgagcagcgtggtcacagtgcctagctctagcctgggcacccagacctacatctgcaatgtgaaccacaagcctagcaacaccaaggtggacaagagagtggaacccaagagctgcgataagacccacacatgtcctccatgtcctgctccagaattcgaaggcggcccttctgtgttcctgtttcctccaaagcctaaggacaccctgtacatcaccagagaacctgaagtgacctgcgtggtggtggatgtgtctcacgaggaccccgaagtgaagttcaattggtacgtggacggcgtggaagtgcacaacgccaagaccaagcctagagaggaacagtacaacagcacctacagagtggtgtccgtgctgaccgtgctgcaccaggattggctgaacggcaaagagtacaagtgcaaggtgtccaacaaggccctgcctgcttccatcgagaaaaccatcagcaaggccaagggccagcctagggaaccccaggtttgtacccttcctccaagccgggaagagatgaccaagaaccaggtgtccctgagctgtgccgtgaagggcttctaccccagcgacattgccgtggaatgggagagcaatggccagcctgagaacaactacaagacaacccctcctgtgctggacagcgacggctcattcttcctggtgagcaagctgacagtcgacaagtccagatggcagcagggcaacgtgttcagttgcagcgtgatgcacgaggccctgcacaaccactacacccagaagtccctgagcctgtctcctggaaag

SEQ ID NO: 756-759 - skipped (4 entries)

SEQ ID NO: 760 - protein, 935 aa, synthetic construct; identical to SEQ ID NO: 720

SEQ ID NO: 761 - protein, 945 aa, synthetic construct
EIVLTQSPATLSVSPGERATLSCRASQSVSSLLAWYQRKPGQPPRLLIYGASTRATGIPARFSGSGSGTEFTLTISSLQSEDFAVYYCQQYNDWWTFGQGTKVEIKRTVAAPSVFIFPPSDEQLKSGTASVVCLLNNFYPREAKVQWKVDNALQSGNSQESVTEQDSKDSTYSLSSTLTLSKADYEKHKVYACEVTHQGLSSPVTKSFNRGECGGGGSGGGGSGGGGSSYVLTQPPSVSVAPGQTARITCGGNNIGTKSVHWYQQKPGQAPVLVISSDSDRPSGVPDRFSGSNSGNTATLTISRVEAGDEADYYCHVWDSSSDHWVFGGGTKLTVLGGGGSGGSGSGGGGSASGSGEVQLVESGGGRVKPGGSLRLSCAASGFTFSSYRMNWVRQAPGKGLEWVSSISSGSSYIYFADSVKGRFTISRDNAKNSLFLRMNNLRVEDTAVYYCARAPTLRHSSGWYDPPGTEQSSFDLWGRGTLVTVSSGGSSGQVHLVQSGAEVKKPGASVKVSCKASGYTFTDYFIHWVRQAPGQGLEWMGWINPDDGDTNYAQKFHGWVAMTRDTSINTAYMELSRLKSQDTAVYYCARGTFSLRGFDWFDPWGQGTLVTVSSASTKGPSVFPLAPSSKSTSGGTAALGCLVKDYFPEPVTVSWNSGALTSGVHTFPAVLQSSGLYSLSSVVTVPSSSLGTQTYICNVNHKPSNTKVDKRVEPKSCDKTHTCPPCPAPEFEGGPSVFLFPPKPKDTLYITREPEVTCVVVDVSHEDPEVKFNWYVDGVEVHNAKTKPREEQYNSTYRVVSVLTVLHQDWLNGKEYKCKVSNKALPASIEKTISKAKGQPREPQVCTLPPSREEMTKNQVSLSCAVKGFYPSDIAVEWESNGQPENNYKTTPPVLDSDGSFFLVSKLTVDKSRWQQGNVFSCSVMHEALHNHYTQKSLSLSPGK

SEQ ID NO: 762 - DNA, 2805 bp, synthetic construct; identical to SEQ ID NO: 722
  source 1..2805: mol_type = other DNA

SEQ ID NO: 763 - DNA, 2835 bp, synthetic construct
  source 1..2835: mol_type = other DNA
gagatcgtgctgacacagtctcccgccacactgagtgtgtctccaggcgaaagagccacactgtcctgtagagccagccagagcgttagctctctgctggcctggtatcagagaaagcctggccagcctcctcggctgctgatctatggcgcttctacaagagccaccggcattcccgccagattttctggctctggcagcggcaccgagttcaccctgacaatctctagcctgcagagcgaggacttcgccgtgtactactgccagcagtacaacgactggtggacctttggccagggcaccaaggtggaaatcaagcgtacggtggccgctcccagcgtgttcatcttcccacctagcgacgagcagctgaagtccggcacagcctctgtcgtgtgcctgctgaacaacttctacccccgcgaggccaaagtgcagtggaaggtggacaacgccctgcagagcggcaacagccaggaaagcgtgaccgagcaggacagcaaggactccacctacagcctgagcagcaccctgacactgagcaaggccgactacgagaagcacaaggtgtacgcctgcgaagtgacccaccagggcctgtctagccccgtgaccaagagcttcaaccggggcgagtgtggcggcggaggatctggcggaggtggaagcggaggcggtggaagcagctacgtgctgacacagcctccatccgtgtctgtggctccaggacagaccgccagaatcacatgcggcggcaacaacatcggcaccaagagcgtgcactggtatcagcagaagcctggacaggcccctgtgctcgtgatcagcagcgatagcgatagacctagcggcgtgcccgatagattcagcggcagcaatagcggcaacaccgccacactgaccatcagcagagttgaggctggcgacgaggccgactactactgtcacgtgtgggatagcagcagcgaccactgggttttcggcggaggcacaaagctgacagtgctgggaggtggtggctctggcggatctgggagtggtggcggaggctctgcttctggatctggagaggtgcagctggttgaatctggcggcggaagagtgaagcctggcggatctctgagactgagctgtgccgccagcggcttcaccttcagcagctacagaatgaactgggtccgacaggcccctggcaaaggccttgaatgggtgtccagcatcagcagcggcagctcctacatctacttcgccgacagcgtgaagggcagattcaccatctccagagacaacgccaagaacagcctgttcctgcggatgaacaacctgagagtggaagataccgccgtgtactactgcgccagagcacccacactgagacacagcagcggatggtacgatcctcctggcaccgagcaaagcagcttcgatctgtggggcagaggcaccctggtcacagtctcttctggaggcagctccgggcaggttcacctggttcagtctggcgccgaagtgaagaaacctggcgcctctgtgaaggtgtcctgcaaggccagcggctacacctttaccgactacttcatccactgggtccgacaggcccctggacaaggacttgaatggatgggctggatcaaccccgacgacggcgataccaattacgcccagaaattccacggctgggtcgccatgaccagagacacctctatcaacaccgcctacatggaactgagccggctgaagtctcaggacaccgccgtgtactattgcgccagaggcacctttagcctgcggggcttcgattggttcgatccttggggacagggcaccctggtcacagtctcttctgcttcgaccaagggcccatccgtgtttcctctggctcccagcagcaagtctacaagcggaggaacagccgctctgggctgcctggtcaaggattactttcccgagcctgtgaccgtgtcctggaattctggcgctctgacaagcggcgtgcacacctttccagctgtgctgcaaagcagcggcctgtactctctgagcagcgtggtcacagtgcctagctctagcctgggcacccagacctacatctgcaatgtgaaccacaagcctagcaacaccaaggtggacaagagagtggaacccaagagctgcgataagacccacacatgtcctccatgtcctgctccagaattcgaaggcggcccttctgtgttcctgtttcctccaaagcctaaggacaccctgtacatcaccagagaacctgaagtgacctgcgtggtggtggatgtgtctcacgaggaccccgaagtgaagttcaattggtacgtggacggcgtggaagtgcacaacgccaagaccaagcctagagaggaacagtacaacagcacctacagagtggtgtccgtgctgaccgtgctgcaccaggattggctgaacggcaaagagtacaagtgcaaggtgtccaacaaggccctgcctgcttccatcgagaaaaccatcagcaaggccaagggccagcctagggaaccccaggtttgtacccttcctccaagccgggaagagatgaccaagaaccaggtgtccctgagctgtgccgtgaagggcttctaccccagcgacattgccgtggaatgggagagcaatggccagcctgagaacaactacaagacaacccctcctgtgctggacagcgacggctcattcttcctggtgagcaagctgacagtcgacaagtccagatggcagcagggcaacgtgttcagttgcagcgtgatgcacgaggccctgcacaaccactacacccagaagtccctgagcctgtctcctggaaag

SEQ ID NO: 764 - protein, 10 aa, synthetic construct
QQSYLTPPNT

SEQ ID NO: 765 - protein, 17 aa, synthetic construct
ARDRPIAVEYTGNWFDP

SEQ ID NO: 766 - protein, 8 aa, synthetic construct
QQYNDWWT

SEQ ID NO: 767 - protein, 15 aa, synthetic construct
ARGTFSLRGFDWFDP

SEQ ID NO: 768 - protein, 8 aa, synthetic construct
QHLNDYPV

SEQ ID NO: 769 - protein, 11 aa, synthetic construct
ARGWDYYGMDV

SEQ ID NO: 770 - protein, 6 aa, synthetic construct
QGITAD

SEQ ID NO: 771 - protein, 9 aa, synthetic construct
QHHDTYSIA

SEQ ID NO: 772 - protein, 107 aa, synthetic construct
DIQLTQSPSFLSASVGDRVTLTCRASQGITADLAWYQQKPGKAPKLLIYAASTLQSGVPSRFSGSGSGTEFTLTVGSLQPEDFATYYCQHHDTYSIAFGQGTRLEIK

SEQ ID NO: 773 - protein, 8 aa, synthetic construct
GVIVSSNY

SEQ ID NO: 774 - protein, 11 aa, synthetic construct
ARDTVVYGMDV

SEQ ID NO: 775 - protein, 117 aa, synthetic construct
EVQLVESGGGLVQPGGSLRLSCAASGVIVSSNYMNWVRQAPGKGLEWVSVIYSGGSTFYADSVRGRFTISRHDSQNTLFLQMNSLRPEDTAVYYCARDTVVYGMDVWGQGTTVIVSS

SEQ ID NO: 776 - protein, 7 aa, synthetic construct
IFAGGST

SEQ ID NO: 777 - protein, 117 aa, synthetic construct
VQLVETGGGLVQPGGSLRLSCAASGVIVSRNYMSWVRQAPGKGLEWVSLIFAGGSTFYSDSVKGRFTISRDDSRNTVYLQMNSLRAEDTAVYYCARDLDVRGGLDVWGQGTTVTVSS

SEQ ID NO: 778 - protein, 6 aa, synthetic construct
QDINKF

SEQ ID NO: 779 - protein, 9 aa, synthetic construct
QQYDNLPPG

SEQ ID NO: 780 - protein, 107 aa, synthetic construct
DIQMTQSPPSLSASVGDRVTITCQASQDINKFLNWFQQKPGKAPKLLIYDASNVEPGVPSRFSGSGSGTDFTFTISSLQPEDIATYYCQQYDNLPPGFGGGTKVEIR

SEQ ID NO: 781 - protein, 8 aa, synthetic construct
GLTVSSNY

SEQ ID NO: 782 - protein, 7 aa, synthetic construct
IYPGGSA

SEQ ID NO: 783 - protein, 18 aa, synthetic construct
ARDRPSLGVGGGGLALRD

SEQ ID NO: 784 - protein, 124 aa, synthetic construct
EVQLVESGGGLVQPGGSLRVSCAASGLTVSSNYMTWVRQAPGKGLEWVSVIYPGGSAFYADSVKGRFSITRDNSKNTLYLQMNSLRAEDTAVYYCARDRPSLGVGGGGLALRDWGQGTLVTVSS

SEQ ID NO: 785 - protein, 6 aa, synthetic construct
QGISDS

SEQ ID NO: 786 - protein, 9 aa, synthetic construct
QQLNSDSYT

SEQ ID NO: 787 - protein, 107 aa, synthetic construct
DIQLTQSPSFLSASVGDRVTITCRASQGISDSLAWYQQKPGTAPKLLIYGASTLQSGVPSRFSGSGSATEFTLTISSLQPEDFATYYCQQLNSDSYTFGQGTKLEIK

SEQ ID NO: 788 - protein, 8 aa, synthetic construct
GIVVSANY

SEQ ID NO: 789 - protein, 7 aa, synthetic construct
LFAGGST

SEQ ID NO: 790 - protein, 11 aa, synthetic construct
ARNLVYYGMDV

SEQ ID NO: 791 - protein, 117 aa, synthetic construct
EVQLVESGGGLVQPGGSLRLSCAASGIVVSANYMTWVRQAPGKGLEGVSLLFAGGSTFYADSVKGRFTISRDNSKNTVFLQMNNLRAEDTAVYYCARNLVYYGMDVWGQGTTVTVST

SEQ ID NO: 792 - protein, 9 aa, synthetic construct
QHYDNPPYT

SEQ ID NO: 793 - protein, 13 aa, synthetic construct
SRPIVGGRRGMDV

SEQ ID NO: 794 - protein, 6 aa, synthetic construct
QGIGNS

SEQ ID NO: 795 - protein, 10 aa, synthetic construct
  VARIANT 6: note = X is T or P
QQYYSXPPFT

SEQ ID NO: 796 - protein, 108 aa, synthetic construct
DIQMTQSPFSLSASVGDRVTITCRASQGIGNSLAWYQQRPGKAPKLLLYAASTLESGVPSRFGGSGSGTDFTLTISSLQPEDFATYYCQQYYSTPPFTFGPGTKVDFK

SEQ ID NO: 797 - protein, 10 aa, synthetic construct
GGSISRTSYY

SEQ ID NO: 798 - protein, 7 aa, synthetic construct
IFYSGST

SEQ ID NO: 799 - protein, 9 aa, synthetic construct
TRQMGLIDY

SEQ ID NO: 800 - protein, 117 aa, synthetic construct
QLQLQESGPGLVKPSETLSLTCTVSGGSISRTSYYWGWIRQTPGKGLEWIGAIFYSGSTHYNPSLKSRVTISVDTSKDQFSLKLSSVTAADTAIYYCTRQMGLIDYWGQGTLVTVSS

SEQ ID NO: 801 - protein, 6 aa, synthetic construct
QGISNS

SEQ ID NO: 802 - protein, 108 aa, synthetic construct
DIQMTQSPSSLSASVGDRVTITCRASQGISNSLAWYQQKPGRAPKFLLYAASTLESGVPSRFSGSGSETDFTLTISSLQPEDFATYYCQQYYSPPPFTFGPGTKVDIK

SEQ ID NO: 803 - protein, 10 aa, synthetic construct
GDSISRSSYY

SEQ ID NO: 804 - protein, 7 aa, synthetic construct
IYYSGTT

SEQ ID NO: 805 - protein, 9 aa, synthetic construct
ARQMGFVDY

SEQ ID NO: 806 - protein, 117 aa, synthetic construct
QLQLQESGPGLVKPSETLSLTCTVSGDSISRSSYYWGWVRQPPGKGLEWIGNIYYSGTTYFNPSLQSRVTISVDTSKNQFSLKLSSVTAADTAVYYCARQMGFVDYWGQGTLVTVSS

SEQ ID NO: 807 - protein, 6 aa, synthetic construct
EGISNS

SEQ ID NO: 808 - protein, 10 aa, synthetic construct
QQYYSSPPFT

SEQ ID NO: 809 - protein, 108 aa, synthetic construct
DIQLTQSPSSLSASVGDRVTITCRASEGISNSLAWYQHKPGKAPRFLLYAASTLESGVPSRFSGSGSGTDFTLTISGLQPEDFATYYCQQYYSSPPFTFGPGTTVDIR

SEQ ID NO: 810 - protein, 10 aa, synthetic construct
GGSISSSSYY

SEQ ID NO: 811 - protein, 7 aa, synthetic construct
MFYSGST

SEQ ID NO: 812 - protein, 9 aa, synthetic construct
TRQMGFVDY

SEQ ID NO: 813 - protein, 117 aa, synthetic construct
QLQLQESGPGLVKPSETLSLTCSVSGGSISSSSYYWGWIRQPPGKGLEWIGNMFYSGSTYYNPSLKSRVTISVDTSQNQVSLKLSSVTASDTAVYYCTRQMGFVDYWGQGTLVTVSS

SEQ ID NO: 814 - protein, 8 aa, synthetic construct
SSNIGGNT

SEQ ID NO: 815 - protein, 11 aa, synthetic construct
AAWDDSLNGQV

SEQ ID NO: 816 - protein, 110 aa, synthetic construct
QSVLTQPPSASGPPGQRVTISCSGSSSNIGGNTVNWYQQLPGTAPKLLIYNNNQRPSGVPDRFSGSKSGTSASLTISGLQSEDEADYYCAAWDDSLNGQVFGGGTKLTVL

SEQ ID NO: 817 - protein, 8 aa, synthetic construct
GYSFSNYW

SEQ ID NO: 818 - protein, 8 aa, synthetic construct
VYPYDSDT

SEQ ID NO: 819 - protein, 17 aa, synthetic construct
ARHGHYYGSGSYDGPDY

SEQ ID NO: 820 - protein, 124 aa, synthetic construct
EVQLVQSGAEVKKPGESLKISCKGSGYSFSNYWIGWVRQMPGKGLEWMGIVYPYDSDTRYSPSFQGQVTISADKSLTTAYLQWSSVKASDTAIYYCARHGHYYGSGSYDGPDYWGQGTLVTVSS

SEQ ID NO: 821 - protein, 11 aa, synthetic construct
QVWDSSSDHWV

SEQ ID NO: 822 - protein, 110 aa, synthetic construct
SYVLTQPPSMSVAAGKTAKITCGGNNIGSKSVHWYQQKPGQAPVLVIYSDSDRPSGIPERFSGSNSGNTATLTISRVEVEAGDEADYYCQVWDSSSDHWVFGGGTKLTVL

SEQ ID NO: 823 - protein, 8 aa, synthetic construct
GFTFSSYW

SEQ ID NO: 824 - protein, 8 aa, synthetic construct
IKEDGSEK

SEQ ID NO: 825 - protein, 20 aa, synthetic construct
ARDPHTNGWYREKYYNGMDV

SEQ ID NO: 826 - protein, 127 aa, synthetic construct
EVQLVESGGNLVQPGGSLRLSCAASGFTFSSYWMTWVRRAPGKGLEWVANIKEDGSEKYYVDSVKGRFTISRDNAKNSLYLHMNSLRGEDTAVYYCARDPHTNGWYREKYYNGMDVWGQGTTVTVSS

SEQ ID NO: 827 - protein, 8 aa, synthetic construct
SSNVGTYT

SEQ ID NO: 828-829 - skipped (2 entries)

SEQ ID NO: 830 - protein, 11 aa, synthetic construct
AAWDDSLNGWV

SEQ ID NO: 831 - protein, 110 aa, synthetic construct
QSVLTQPPSASGTPGQRVTISCSGSSSNVGTYTVNWYQQLPGTAPKLLVYSYNHRPSGVPDRFSGSKSGTSASLAISGLQSEDEADYYCAAWDDSLNGWVFGGGTKLSVL

SEQ ID NO: 832 - protein, 8 aa, synthetic construct
GFTFDDNA

SEQ ID NO: 833 - protein, 8 aa, synthetic construct
INWSGGDI

SEQ ID NO: 834 - protein, 14 aa, synthetic construct
AKGTVGEILFPLDY

SEQ ID NO: 835 - protein, 121 aa, synthetic construct
EVQLVESGGNLVQPGRSLRLSCAASGFTFDDNAMHWVRQAPGKGLEWVSSINWSGGDIAYADSVKGRFTISRDNAKNSLYLQMNSLRADDTALYYCAKGTVGEILFPLDYWGQGTLVTVSS

SEQ ID NO: 836 - protein, 6 aa, synthetic construct
QSVNSN

SEQ ID NO: 837 - protein, 8 aa, synthetic construct
QQYDNWYT

SEQ ID NO: 838 - protein, 106 aa, synthetic construct
EVVMTQSPATLSVSPGERATLSCRAGQSVNSNLAWYQHKPGQAPRLLIYDASTRATGIPARFSGSGSGTDFTLTISSLQSDDFALYYCQQYDNWYTFGQGTKLEIK

SEQ ID NO: 839 - protein, 8 aa, synthetic construct
GFTFSRYA

SEQ ID NO: 840 - protein, 8 aa, synthetic construct
ISDDGRTK

SEQ ID NO: 841 - protein, 17 aa, synthetic construct
ARDRWHRVTPAFYYFDL

SEQ ID NO: 842 - protein, 124 aa, synthetic construct
QEHLVESGGGVVQPGRSLRLSCAVSGFTFSRYAMHWVRQAPGKGLEWVAVISDDGRTKYYGDSAEGRFTISRDNSKNTLFLQMNSLRADDTAVFYCARDRWHRVTPAFYYFDLWGQGTLVTVSS

SEQ ID NO: 843 - protein, 9 aa, synthetic construct
QQYGDLPVT

SEQ ID NO: 844 - protein, 107 aa, synthetic construct
DMQMTQSPSSLSASVGDRVTITCQASQDISNYLNWYQQKPGKAPKLLIYDASNLETGVPSRFSGSGSGTDFTFTIGSLQPEDFATYYCQQYGDLPVTFGGGTKVEIK

SEQ ID NO: 845 - protein, 8 aa, synthetic construct
GFTFRNYG

SEQ ID NO: 846 - protein, 8 aa, synthetic construct
IVYDGSDK

SEQ ID NO: 847 - protein, 20 aa, synthetic construct
AKRGGPYCSAGPCYGGYFDY

SEQ ID NO: 848 - protein, 127 aa, synthetic construct
QVQLVESGGGVVQPGKSLRLSCAASGFTFRNYGMVWVRQAPGKGLEWVADIVYDGSDKYYADSVKGRFTISRDNAKNTLYLQMNSLRTEDTAVYFCAKRGGPYCSAGPCYGGYFDYWGQGSLVTVSS

SEQ ID NO: 849 - protein, 12 aa, synthetic construct
QSVLDSSNNRNY

SEQ ID NO: 850 - protein, 9 aa, synthetic construct
QQYYSTPQT

SEQ ID NO: 851 - protein, 113 aa, synthetic construct
DIVMTQSPDSLAVSLGERATINCKSSQSVLDSSNNRNYLAWYHQKPGQPPKLLIYWASTRESGVPDRFSGSGSGTDFTLTISSLQAEDVAVYYCQQYYSTPQTFGQGTKLEII

SEQ ID NO: 852 - protein, 8 aa, synthetic construct
GFTFGDSA

SEQ ID NO: 853 - protein, 10 aa, synthetic construct
IRSKAWGGTT

SEQ ID NO: 854 - protein, 16 aa, synthetic construct
TRDRRCSGLSCYLLDF

SEQ ID NO: 855 - protein, 125 aa, synthetic construct
EAQLVESGGGLVQPGRSLRLSCTASGFTFGDSAMSWFRQAPGKGLEWVGFIRSKAWGGTTDYAASVKGRFTISRDDSKSIAYLQMNSLKTEDTAVYYCTRDRRCSGLSCYLLDFLGQGTLVTVSS

SEQ ID NO: 856 - protein, 10 aa, synthetic construct
QQHDNVPLTF

SEQ ID NO: 857 - protein, 20 aa, synthetic construct
ARSTPFYDRRGFYFLGYFQH

SEQ ID NO: 858 - protein, 6 aa, synthetic construct
QDVTNY

SEQ ID NO: 859 - protein, 10 aa, synthetic construct
QQYGNLPLTF

SEQ ID NO: 860 - protein, 107 aa, synthetic construct
DVQMTQSPSSLSASVGDRVTITCQASQDVTNYLNWYQQKPGQAPKVLISDASDLETGVPSRFSGSGSGTDFTFTISSLQPEDIATYYCQQYGNLPLTFGGGTKVEIK

SEQ ID NO: 861 - protein, 9 aa, synthetic construct
GYIFTSFAI

SEQ ID NO: 862 - protein, 8 aa, synthetic construct
INPGNGNT

SEQ ID NO: 863 - protein, 20 aa, synthetic construct
ARSTPYYDRTGSYWLGYFQH

SEQ ID NO: 864 - protein, 127 aa, synthetic construct
QVQLVQSGAEVKKPGASVKVSCKASGYIFTSFAIHWVRQAPGHRPEWMGWINPGNGNTQYSQKFQGRVTITRDTSASTANMELSSLGSEDTAVYFCARSTPYYDRTGSYWLGYFQHWGQGTLVSVSS

SEQ ID NO: 865 - protein, 6 aa, synthetic construct
QDISNH

SEQ ID NO: 866 - protein, 10 aa, synthetic construct
QQYDNLPLTF

SEQ ID NO: 867 - protein, 107 aa, synthetic construct
DIQMTQSPSSLSASVGDRVTITCQASQDISNHLNWYQQKPGKAPKVLISDASDLETGVPSRFSGSGSGTDFTFIINSLQPEDFATYYCQQYDNLPLTFGGGTKVETK

SEQ ID NO: 868 - protein, 9 aa, synthetic construct
GYIFTSFAL

SEQ ID NO: 869 - protein, 8 aa, synthetic construct
INAGNGDT

SEQ ID NO: 870 - protein, 20 aa, synthetic construct
ARSTPYYDRRGYYWLNYFQH

SEQ ID NO: 871 - protein, 127 aa, synthetic construct
QVQLVQSGAEVKKPGASVKVSCKASGYIFTSFALHWVRQAPGQRPEWMGWINAGNGDTEYSQKFQGRVTITRDTSATTATMELSSLRSEDTAVYFCARSTPYYDRRGYYWLNYFQHWGQGTLVTVSS

SEQ ID NO: 872 - protein, 10 aa, synthetic construct
QQDGNLPLTF

SEQ ID NO: 873 - protein, 107 aa, synthetic construct
DIQMTQSPSSLSASVGDRVTITCQASQDINNYLNWYQQKPGEAPKVVIFDATDLETGVPSRFSGSGSGTDFTFTISSLQPEDIATYYCQQDGNLPLTFGGGTKLEIK

SEQ ID NO: 874 - protein, 10 aa, synthetic construct
GYTFTSHNFG

SEQ ID NO: 875 - protein, 8 aa, synthetic construct
INTGNGNT

SEQ ID NO: 876 - protein, 20 aa, synthetic construct
ARSTPYYDRSGHYCLGYFQH

SEQ ID NO: 877 - protein, 129 aa, synthetic construct
QVQLVQSGAEVKKPGASVKVSCKSSGYTFTSHNFGIHWVRLAPGQRLEWMGWINTGNGNTKYSQKSQGRVTITRDTSASTAYMELSNLNSEDTAVYYCARSTPYYDRSGHYCLGYFQHWGQGTLVSVSS

SEQ ID NO: 878 - protein, 6 aa, synthetic construct
QDVSNF

SEQ ID NO: 879 - protein, 10 aa, synthetic construct
QQYGNLPLTF

SEQ ID NO: 880 - protein, 107 aa, synthetic construct
DIQMTQSPSSLSASVGDRVTITCQASQDVSNFLNWYQQKPGEAPKVLISDASSLETGVPSRFSGSGSGTDFTFTISSLQPEDIATYYCQQYGNLPLTFGGGTKVEIK

SEQ ID NO: 881 - protein, 9 aa, synthetic construct
GYIFTSFAI

SEQ ID NO: 882 - protein, 8 aa, synthetic construct
INAGNGNT

SEQ ID NO: 883 - protein, 20 aa, synthetic construct
ARSTPYYDRTGSYWLGYFQH

SEQ ID NO: 884 - protein, 127 aa, synthetic construct
QVQLVQSGAEVKKPGASVKVSCKASGYIFTSFAIHWVRQAPGQRLEWMGWINAGNGNTEYSQKFQGRVTITRDTSASTANMYLSSLRSEDTAVYYCARSTPYYDRTGSYWLGYFQHWGQGTLVSVSS

SEQ ID NO: 885 - protein, 10 aa, synthetic construct
QQSYITPQGT

SEQ ID NO: 886 - protein, 14 aa, synthetic construct
TREDSRGLYWYFDL

SEQ ID NO: 887 - protein, 934 aa, synthetic construct
DVQMTQSPSSLSASVGDRVTITCRASQTIVGYLNWYQQQPGRAPKLLIYAASNLQSGVPPRFSGSGSGTDFTLTISDLQPEDFATYYCQQSYLTPPNTFGQGTKLEIKRTVAAPSVFIFPPSDEQLKSGTASVVCLLNNFYPREAKVQWKVDNALQSGNSQESVTEQDSKDSTYSLSSTLTLSKADYEKHKVYACEVTHQGLSSPVTKSFNRGECGGGGSGGGGSGGGGSEIVLTQSPGTLSLSPGETATLSCRASQSFSSDLAWYQQKPGQAPRLLIYGASSRATGIPDRFSGSGSGTDFTLTISRLEPADFAVYYCQQYGSSPPVTFGGGTKVEIKGGGGSGGSGSGGGGSASGSGEVQLVESGGGLIQPGGSLRLSCAASGVIVSYNYMNWVRQAPGKGLEWVSVIYSGGSTFYADSVRGRFTISRDNSKNTLYLQMNSLRAEDTAVYYCARDLGPAGAFDIWGLGTMVTVSSGGSSGQVQLVQSGAEVKKPGSSVKVSCKVSGGTFSDSAVSWVRQAPGQGLEWMGRIIPIFSTIEYAQNFQGRVTITADESTTTVYMELSYLGLEDTAVYYCARDRPIAVEYTGNWFDPWGQGTLVTVSSASTKGPSVFPLAPSSKSTSGGTAALGCLVKDYFPEPVTVSWNSGALTSGVHTFPAVLQSSGLYSLSSVVTVPSSSLGTQTYICNVNHKPSNTKVDKKVEPKSCDKTHTCPPCPAPELLGGPSVFLFPPKPKDTLMISRTPEVTCVVVDVSHEDPEVKFNWYVDGVEVHNAKTKPREEQYNSTYRVVSVLTVLHQDWLNGKEYKCKVSNKALPAPIEKTISKAKGQPREPQVYTLPPCRDELTKNQVSLWCLVKGFYPSDIAVEWESNGQPENNYKTTPPVLDSDGSFFLYSKLTVDKSRWQQGNVFSCSVLHEALHAHYTQKSLSLSPG

SEQ ID NO: 888 - protein, 954 aa, synthetic construct
SYVLTQPPSVSVAPGQTARITCGGNNIGTKSVHWYQQKPGQAPVLVISSDSDRPSGVPDRFSGSNSGNTATLTISRVEAGDEADYYCHVWDSSSDHWVFGGGTKLTVLRTVAAPSVFIFPPSDEQLKSGTASVVCLLNNFYPREAKVQWKVDNALQSGNSQESVTEQDSKDSTYSLSSTLTLSKADYEKHKVYACEVTHQGLSSPVTKSFNRGECGGGGSGGGGSGGGGSDTVMTQSPLSLPVTPGEPASISCRSSQSLLNSNGYNYLDWYVQKPGQSPQLLIYLGSNRASGVPDRFSGSGSGTDFTLKISRVEAEDVGVYYCMQPLQTPLFTFGPGTKVEIKGGGGSGGSGSGGGGSASGSGQVTLRESGPALVKPTQTLTLTCTFSGFSLSTRGVCVSWIRQPPGKALEWLAFIDWDDDKYYQTSLKTRLTISKDTSKNQVVLTMTNVHPVDTATYYCARISSHHGSSWCTTFDYWGQGALVTVSAGGSSGEVQLVESGGGRVKPGGSLRLSCAASGFTFSSYRMNWVRQAPGKGLEWVSSISSGSSYIYFADSVKGRFTISRDNAKNSLFLRMNNLRVEDTAVYYCARAPTLRHSSGWYDPPGTENSSFDLWGRGTLVTVSSASTKGPSVFPLAPSSKSTSGGTAALGCLVKDYFPEPVTVSWNSGALTSGVHTFPAVLQSSGLYSLSSVVTVPSSSLGTQTYICNVNHKPSNTKVDKKVEPKSCDKTHTCPPCPAPELLGGPSVFLFPPKPKDTLMISRTPEVTCVVVDVSHEDPEVKFNWYVDGVEVHNAKTKPREEQYNSTYRVVSVLTVLHQDWLNGKEYKCKVSNKALPAPIEKTISKAKGQPREPQVCTLPPSRDELTKNQVSLSCAVKGFYPSDIAVEWESNGQPENNYKTTPPVLDSDGSFFLVSKLTVDKSRWQQGNVFSCSVLHEALHAHYTQKSLSLSPG

SEQ ID NO: 889 - protein, 934 aa, synthetic construct; identical to SEQ ID NO: 887

SEQ ID NO: 890 - protein, 954 aa, synthetic construct
DTVMTQSPLSLPVTPGEPASISCRSSQSLLNSNGYNYLDWYVQKPGQSPQLLIYLGSNRASGVPDRFSGSGSGTDFTLKISRVEAEDVGVYYCMQPLQTPLFTFGPGTKVEIKRTVAAPSVFIFPPSDEQLKSGTASVVCLLNNFYPREAKVQWKVDNALQSGNSQESVTEQDSKDSTYSLSSTLTLSKADYEKHKVYACEVTHQGLSSPVTKSFNRGECGGGGSGGGGSGGGGSSYVLTQPPSVSVAPGQTARITCGGNNIGTKSVHWYQQKPGQAPVLVISSDSDRPSGVPDRFSGSNSGNTATLTISRVEAGDEADYYCHVWDSSSDHWVFGGGTKLTVLGGGGSGGSGSGGGGSASGSGEVQLVESGGGRVKPGGSLRLSCAASGFTFSSYRMNWVRQAPGKGLEWVSSISSGSSYIYFADSVKGRFTISRDNAKNSLFLRMNNLRVEDTAVYYCARAPTLRHSSGWYDPPGTENSSFDLWGRGTLVTVSSGGSSGQVTLRESGPALVKPTQTLTLTCTFSGFSLSTRGVCVSWIRQPPGKALEWLAFIDWDDDKYYQTSLKTRLTISKDTSKNQVVLTMTNVHPVDTATYYCARISSHHGSSWCTTFDYWGQGALVTVSAASTKGPSVFPLAPSSKSTSGGTAALGCLVKDYFPEPVTVSWNSGALTSGVHTFPAVLQSSGLYSLSSVVTVPSSSLGTQTYICNVNHKPSNTKVDKKVEPKSCDKTHTCPPCPAPELLGGPSVFLFPPKPKDTLMISRTPEVTCVVVDVSHEDPEVKFNWYVDGVEVHNAKTKPREEQYNSTYRVVSVLTVLHQDWLNGKEYKCKVSNKALPAPIEKTISKAKGQPREPQVCTLPPSRDELTKNQVSLSCAVKGFYPSDIAVEWESNGQPENNYKTTPPVLDSDGSFFLVSKLTVDKSRWQQGNVFSCSVLHEALHAHYTQKSLSLSPG

SEQ ID NO: 891 - protein, 942 aa, synthetic construct; identical to SEQ ID NO: 487

SEQ ID NO: 892 - protein, 946 aa, synthetic construct
DTVMTQSPLSLPVTPGEPASISCRSSQSLLNSNGYNYLDWYVQKPGQSPQLLIYLGSNRASGVPDRFSGSGSGTDFTLKISRVEAEDVGVYYCMQPLQTPLFTFGPGTKVEIKRTVAAPSVFIFPPSDEQLKSGTASVVCLLNNFYPREAKVQWKVDNALQSGNSQESVTEQDSKDSTYSLSSTLTLSKADYEKHKVYACEVTHQGLSSPVTKSFNRGECGGGGSGGGGSGGGGSDVQMTQSPSSLSASVGDRVTITCRASQTIVGYLNWYQQQPGRAPKLLIYAASNLQSGVPPRFSGSGSGTDFTLTISDLQPEDFATYYCQQSYLTPPNTFGQGTKLEIKGGGGSGGSGSGGGGSASGSGQVQLVQSGAEVKKPGSSVKVSCKVSGGTFSDSAVSWVRQAPGQGLEWMGRIIPIFSTIEYAQNFQGRVTITADESTTTVYMELSYLGLEDTAVYYCARDRPIAVEYTGNWFDPWGQGTLVTVSSGGSSGQVTLRESGPALVKPTQTLTLTCTFSGFSLSTRGVCVSWIRQPPGKALEWLAFIDWDDDKYYQTSLKTRLTISKDTSKNQVVLTMTNVHPVDTATYYCARISSHHGSSWCTTFDYWGQGALVTVSAASTKGPSVFPLAPSSKSTSGGTAALGCLVKDYFPEPVTVSWNSGALTSGVHTFPAVLQSSGLYSLSSVVTVPSSSLGTQTYICNVNHKPSNTKVDKKVEPKSCDKTHTCPPCPAPELLGGPSVFLFPPKPKDTLMISRTPEVTCVVVDVSHEDPEVKFNWYVDGVEVHNAKTKPREEQYNSTYRVVSVLTVLHQDWLNGKEYKCKVSNKALPAPIEKTISKAKGQPREPQVCTLPPSRDELTKNQVSLSCAVKGFYPSDIAVEWESNGQPENNYKTTPPVLDSDGSFFLVSKLTVDKSRWQQGNVFSCSVLHEALHAHYTQKSLSLSPG

SEQ ID NO: 893 - protein, 942 aa, synthetic construct; identical to SEQ ID NO: 487

SEQ ID NO: 894 - protein, 946 aa, synthetic construct
DVQMTQSPSSLSASVGDRVTITCRASQTIVGYLNWYQQQPGRAPKLLIYAASNLQSGVPPRFSGSGSGTDFTLTISDLQPEDFATYYCQQSYLTPPNTFGQGTKLEIKRTVAAPSVFIFPPSDEQLKSGTASVVCLLNNFYPREAKVQWKVDNALQSGNSQESVTEQDSKDSTYSLSSTLTLSKADYEKHKVYACEVTHQGLSSPVTKSFNRGECGGGGSGGGGSGGGGSDTVMTQSPLSLPVTPGEPASISCRSSQSLLNSNGYNYLDWYVQKPGQSPQLLIYLGSNRASGVPDRFSGSGSGTDFTLKISRVEAEDVGVYYCMQPLQTPLFTFGPGTKVEIKGGGGSGGSGSGGGGSASGSGQVTLRESGPALVKPTQTLTLTCTFSGFSLSTRGVCVSWIRQPPGKALEWLAFIDWDDDKYYQTSLKTRLTISKDTSKNQVVLTMTNVHPVDTATYYCARISSHHGSSWCTTFDYWGQGALVTVSAGGSSGQVQLVQSGAEVKKPGSSVKVSCKVSGGTFSDSAVSWVRQAPGQGLEWMGRIIPIFSTIEYAQNFQGRVTITADESTTTVYMELSYLGLEDTAVYYCARDRPIAVEYTGNWFDPWGQGTLVTVSSASTKGPSVFPLAPSSKSTSGGTAALGCLVKDYFPEPVTVSWNSGALTSGVHTFPAVLQSSGLYSLSSVVTVPSSSLGTQTYICNVNHKPSNTKVDKKVEPKSCDKTHTCPPCPAPELLGGPSVFLFPPKPKDTLMISRTPEVTCVVVDVSHEDPEVKFNWYVDGVEVHNAKTKPREEQYNSTYRVVSVLTVLHQDWLNGKEYKCKVSNKALPAPIEKTISKAKGQPREPQVCTLPPSRDELTKNQVSLSCAVKGFYPSDIAVEWESNGQPENNYKTTPPVLDSDGSFFLVSKLTVDKSRWQQGNVFSCSVLHEALHAHYTQKSLSLSPG

SEQ ID NO: 895 - protein, 942 aa, synthetic construct
SYVLTQPPSVSVAPGQTARITCGGNNIGTKSVHWYQQKPGQAPVLVISSDSDRPSGVPDRFSGSNSGNTATLTISRVEAGDEADYYCHVWDSSSDHWVFGGGTKLTVLRTVAAPSVFIFPPSDEQLKSGTASVVCLLNNFYPREAKVQWKVDNALQSGNSQESVTEQDSKDSTYSLSSTLTLSKADYEKHKVYACEVTHQGLSSPVTKSFNRGECGGGGSGGGGSGGGGSEIVLTQSPGTLSLSPGETATLSCRASQSFSSDLAWYQQKPGQAPRLLIYGASSRATGIPDRFSGSGSGTDFTLTISRLEPADFAVYYCQQYGSSPPVTFGGGTKVEIKGGGGSGGSGSGGGGSASGSGEVQLVESGGGLIQPGGSLRLSCAASGVIVSYNYMNWVRQAPGKGLEWVSVIYSGGSTFYADSVRGRFTISRDNSKNTLYLQMNSLRAEDTAVYYCARDLGPAGAFDIWGLGTMVTVSSGGSSGEVQLVESGGGRVKPGGSLRLSCAASGFTFSSYRMNWVRQAPGKGLEWVSSISSGSSYIYFADSVKGRFTISRDNAKNSLFLRMNNLRVEDTAVYYCARAPTLRHSSGWYDPPGTENSSFDLWGRGTLVTVSSASTKGPSVFPLAPSSKSTSGGTAALGCLVKDYFPEPVTVSWNSGALTSGVHTFPAVLQSSGLYSLSSVVTVPSSSLGTQTYICNVNHKPSNTKVDKKVEPKSCDKTHTCPPCPAPELLGGPSVFLFPPKPKDTLMISRTPEVTCVVVDVSHEDPEVKFNWYVDGVEVHNAKTKPREEQYNSTYRVVSVLTVLHQDWLNGKEYKCKVSNKALPAPIEKTISKAKGQPREPQVYTLPPCRDELTKNQVSLWCLVKGFYPSDIAVEWESNGQPENNYKTTPPVLDSDGSFFLYSKLTVDKSRWQQGNVFSCSVLHEALHAHYTQKSLSLSPG

SEQ ID NO: 896 - protein, 946 aa, synthetic construct; identical to SEQ ID NO: 892

SEQ ID NO: 897 - protein, 942 aa, synthetic construct; identical to SEQ ID NO: 895

SEQ ID NO: 898 - protein, 946 aa, synthetic construct; identical to SEQ ID NO: 894

SEQ ID NO: 899 - protein, 940 aa, synthetic construct
EIVLTQSPGTLSLSPGETATLSCRASQSFSSDLAWYQQKPGQAPRLLIYGASSRATGIPDRFSGSGSGTDFTLTISRLEPADFAVYYCQQYGSSPPVTFGGGTKVEIKRTVAAPSVFIFPPSDEQLKSGTASVVCLLNNFYPREAKVQWKVDNALQSGNSQESVTEQDSKDSTYSLSSTLTLSKADYEKHKVYACEVTHQGLSSPVTKSFNRGECGGGGSGGGGSGGGGSDTVMTQSPLSLPVTPGEPASISCRSSQSLLNSNGYNYLDWYVQKPGQSPQLLIYLGSNRASGVPDRFSGSGSGTDFTLKISRVEAEDVGVYYCMQPLQTPLFTFGPGTKVEIKGGGGSGGSGSGGGGSASGSGQVTLRESGPALVKPTQTLTLTCTFSGFSLSTRGVCVSWIRQPPGKALEWLAFIDWDDDKYYQTSLKTRLTISKDTSKNQVVLTMTNVHPVDTATYYCARISSHHGSSWCTTFDYWGQGALVTVSAGGSSGEVQLVESGGGLIQPGGSLRLSCAASGVIVSYNYMNWVRQAPGKGLEWVSVIYSGGSTFYADSVRGRFTISRDNSKNTLYLQMNSLRAEDTAVYYCARDLGPAGAFDIWGLGTMVTVSSASTKGPSVFPLAPSSKSTSGGTAALGCLVKDYFPEPVTVSWNSGALTSGVHTFPAVLQSSGLYSLSSVVTVPSSSLGTQTYICNVNHKPSNTKVDKKVEPKSCDKTHTCPPCPAPELLGGPSVFLFPPKPKDTLMISRTPEVTCVVVDVSHEDPEVKFNWYVDGVEVHNAKTKPREEQYNSTYRVVSVLTVLHQDWLNGKEYKCKVSNKALPAPIEKTISKAKGQPREPQVYTLPPCRDELTKNQVSLWCLVKGFYPSDIAVEWESNGQPENNYKTTPPVLDSDGSFFLYSKLTVDKSRWQQGNVFSCSVLHEALHAHYTQKSLSLSPG

SEQ ID NO: 900 - protein, 948 aa, synthetic construct
SYVLTQPPSVSVAPGQTARITCGGNNIGTKSVHWYQQKPGQAPVLVISSDSDRPSGVPDRFSGSNSGNTATLTISRVEAGDEADYYCHVWDSSSDHWVFGGGTKLTVLRTVAAPSVFIFPPSDEQLKSGTASVVCLLNNFYPREAKVQWKVDNALQSGNSQESVTEQDSKDSTYSLSSTLTLSKADYEKHKVYACEVTHQGLSSPVTKSFNRGECGGGGSGGGGSGGGGSDVQMTQSPSSLSASVGDRVTITCRASQTIVGYLNWYQQQPGRAPKLLIYAASNLQSGVPPRFSGSGSGTDFTLTISDLQPEDFATYYCQQSYLTPPNTFGQGTKLEIKGGGGSGGSGSGGGGSASGSGQVQLVQSGAEVKKPGSSVKVSCKVSGGTFSDSAVSWVRQAPGQGLEWMGRIIPIFSTIEYAQNFQGRVTITADESTTTVYMELSYLGLEDTAVYYCARDRPIAVEYTGNWFDPWGQGTLVTVSSGGSSGEVQLVESGGGRVKPGGSLRLSCAASGFTFSSYRMNWVRQAPGKGLEWVSSISSGSSYIYFADSVKGRFTISRDNAKNSLFLRMNNLRVEDTAVYYCARAPTLRHSSGWYDPPGTENSSFDLWGRGTLVTVSSASTKGPSVFPLAPSSKSTSGGTAALGCLVKDYFPEPVTVSWNSGALTSGVHTFPAVLQSSGLYSLSSVVTVPSSSLGTQTYICNVNHKPSNTKVDKKVEPKSCDKTHTCPPCPAPELLGGPSVFLFPPKPKDTLMISRTPEVTCVVVDVSHEDPEVKFNWYVDGVEVHNAKTKPREEQYNSTYRVVSVLTVLHQDWLNGKEYKCKVSNKALPAPIEKTISKAKGQPREPQVCTLPPSRDELTKNQVSLSCAVKGFYPSDIAVEWESNGQPENNYKTTPPVLDSDGSFFLVSKLTVDKSRWQQGNVFSCSVLHEALHAHYTQKSLSLSPG

SEQ ID NO: 901 - protein, 940 aa, synthetic construct; identical to SEQ ID NO: 899

SEQ ID NO: 902 - protein, 948 aa, synthetic construct
DVQMTQSPSSLSASVGDRVTITCRASQTIVGYLNWYQQQPGRAPKLLIYAASNLQSGVPPRFSGSGSGTDFTLTISDLQPEDFATYYCQQSYLTPPNTFGQGTKLEIKRTVAAPSVFIFPPSDEQLKSGTASVVCLLNNFYPREAKVQWKVDNALQSGNSQESVTEQDSKDSTYSLSSTLTLSKADYEKHKVYACEVTHQGLSSPVTKSFNRGECGGGGSGGGGSGGGGSSYVLTQPPSVSVAPGQTARITCGGNNIGTKSVHWYQQKPGQAPVLVISSDSDRPSGVPDRFSGSNSGNTATLTISRVEAGDEADYYCHVWDSSSDHWVFGGGTKLTVLGGGGSGGSGSGGGGSASGSGEVQLVESGGGRVKPGGSLRLSCAASGFTFSSYRMNWVRQAPGKGLEWVSSISSGSSYIYFADSVKGRFTISRDNAKNSLFLRMNNLRVEDTAVYYCARAPTLRHSSGWYDPPGTENSSFDLWGRGTLVTVSSGGSSGQVQLVQSGAEVKKPGSSVKVSCKVSGGTFSDSAVSWVRQAPGQGLEWMGRIIPIFSTIEYAQNFQGRVTITADESTTTVYMELSYLGLEDTAVYYCARDRPIAVEYTGNWFDPWGQGTLVTVSSASTKGPSVFPLAPSSKSTSGGTAALGCLVKDYFPEPVTVSWNSGALTSGVHTFPAVLQSSGLYSLSSVVTVPSSSLGTQTYICNVNHKPSNTKVDKKVEPKSCDKTHTCPPCPAPELLGGPSVFLFPPKPKDTLMISRTPEVTCVVVDVSHEDPEVKFNWYVDGVEVHNAKTKPREEQYNSTYRVVSVLTVLHQDWLNGKEYKCKVSNKALPAPIEKTISKAKGQPREPQVCTLPPSRDELTKNQVSLSCAVKGFYPSDIAVEWESNGQPENNYKTTPPVLDSDGSFFLVSKLTVDKSRWQQGNVFSCSVLHEALHAHYTQKSLSLSPG

SEQ ID NO: 903 - protein, 940 aa, synthetic construct
DTVMTQSPLSLPVTPGEPASISCRSSQSLLNSNGYNYLDWYVQKPGQSPQLLIYLGSNRASGVPDRFSGSGSGTDFTLKISRVEAEDVGVYYCMQPLQTPLFTFGPGTKVEIKRTVAAPSVFIFPPSDEQLKSGTASVVCLLNNFYPREAKVQWKVDNALQSGNSQESVTEQDSKDSTYSLSSTLTLSKADYEKHKVYACEVTHQGLSSPVTKSFNRGECGGGGSGGGGSGGGGSEIVLTQSPGTLSLSPGETATLSCRASQSFSSDLAWYQQKPGQAPRLLIYGASSRATGIPDRFSGSGSGTDFTLTISRLEPADFAVYYCQQYGSSPPVTFGGGTKVEIKGGGGSGGSGSGGGGSASGSGEVQLVESGGGLIQPGGSLRLSCAASGVIVSYNYMNWVRQAPGKGLEWVSVIYSGGSTFYADSVRGRFTISRDNSKNTLYLQMNSLRAEDTAVYYCARDLGPAGAFDIWGLGTMVTVSSGGSSGQVTLRESGPALVKPTQTLTLTCTFSGFSLSTRGVCVSWIRQPPGKALEWLAFIDWDDDKYYQTSLKTRLTISKDTSKNQVVLTMTNVHPVDTATYYCARISSHHGSSWCTTFDYWGQGALVTVSAASTKGPSVFPLAPSSKSTSGGTAALGCLVKDYFPEPVTVSWNSGALTSGVHTFPAVLQSSGLYSLSSVVTVPSSSLGTQTYICNVNHKPSNTKVDKKVEPKSCDKTHTCPPCPAPELLGGPSVFLFPPKPKDTLMISRTPEVTCVVVDVSHEDPEVKFNWYVDGVEVHNAKTKPREEQYNSTYRVVSVLTVLHQDWLNGKEYKCKVSNKALPAPIEKTISKAKGQPREPQVYTLPPCRDELTKNQVSLWCLVKGFYPSDIAVEWESNGQPENNYKTTPPVLDSDGSFFLYSKLTVDKSRWQQGNVFSCSVLHEALHAHYTQKSLSLSPG

SEQ ID NO: 904 - protein, 948 aa, synthetic construct; identical to SEQ ID NO: 900

SEQ ID NO: 905 - protein, 940 aa, synthetic construct; identical to SEQ ID NO: 903

SEQ ID NO: 906 - protein, 948 aa, synthetic construct; identical to SEQ ID NO: 902

SEQ ID NO: 907 - protein, 934 aa, synthetic construct
EIVLTQSPGTLSLSPGETATLSCRASQSFSSDLAWYQQKPGQAPRLLIYGASSRATGIPDRFSGSGSGTDFTLTISRLEPADFAVYYCQQYGSSPPVTFGGGTKVEIKRTVAAPSVFIFPPSDEQLKSGTASVVCLLNNFYPREAKVQWKVDNALQSGNSQESVTEQDSKDSTYSLSSTLTLSKADYEKHKVYACEVTHQGLSSPVTKSFNRGECGGGGSGGGGSGGGGSDVQMTQSPSSLSASVGDRVTITCRASQTIVGYLNWYQQQPGRAPKLLIYAASNLQSGVPPRFSGSGSGTDFTLTISDLQPEDFATYYCQQSYLTPPNTFGQGTKLEIKGGGGSGGSGSGGGGSASGSGQVQLVQSGAEVKKPGSSVKVSCKVSGGTFSDSAVSWVRQAPGQGLEWMGRIIPIFSTIEYAQNFQGRVTITADESTTTVYMELSYLGLEDTAVYYCARDRPIAVEYTGNWFDPWGQGTLVTVSSGGSSGEVQLVESGGGLIQPGGSLRLSCAASGVIVSYNYMNWVRQAPGKGLEWVSVIYSGGSTFYADSVRGRFTISRDNSKNTLYLQMNSLRAEDTAVYYCARDLGPAGAFDIWGLGTMVTVSSASTKGPSVFPLAPSSKSTSGGTAALGCLVKDYFPEPVTVSWNSGALTSGVHTFPAVLQSSGLYSLSSVVTVPSSSLGTQTYICNVNHKPSNTKVDKKVEPKSCDKTHTCPPCPAPELLGGPSVFLFPPKPKDTLMISRTPEVTCVVVDVSHEDPEVKFNWYVDGVEVHNAKTKPREEQYNSTYRVVSVLTVLHQDWLNGKEYKCKVSNKALPAPIEKTISKAKGQPREPQVYTLPPCRDELTKNQVSLWCLVKGFYPSDIAVEWESNGQPENNYKTTPPVLDSDGSFFLYSKLTVDKSRWQQGNVFSCSVLHEALHAHYTQKSLSLSPG

SEQ ID NO: 908 - protein, 954 aa, synthetic construct; identical to SEQ ID NO: 888

SEQ ID NO: 909 - protein, 934 aa, synthetic construct; identical to SEQ ID NO: 907

SEQ ID NO: 910 - protein, 954 aa, synthetic construct; identical to SEQ ID NO: 890

SEQ ID NO: 911 - protein, 943 aa, synthetic construct; identical to SEQ ID NO: 632

SEQ ID NO: 912 - protein, 947 aa, synthetic construct
DVQMTQSPSSLSASVGDRVTITCRASQTIVGYLNWYQQQPGRAPKLLIYAASNLQSGVPPRFSGSGSGTDFTLTISDLQPEDFATYYCQQSYLTPPNTFGQGTKLEIKRTVAAPSVFIFPPSDEQLKSGTASVVCLLNNFYPREAKVQWKVDNALQSGNSQESVTEQDSKDSTYSLSSTLTLSKADYEKHKVYACEVTHQGLSSPVTKSFNRGECGGGGSGGGGSGGGGSDTVMTQSPLSLPVTPGEPASISCRSSQSLLNSNGYNYLDWYVQKPGQSPQLLIYLGSNRASGVPDRFSGSGSGTDFTLKISRVEAEDVGVYYCMQPLQTPLFTFGPGTKVEIKGGGGSGGSGSGGGGSASGSGQVTLRESGPALVKPTQTLTLTCTFSGFSLSTRGVCVSWIRQPPGKALEWLAFIDWDDDKYYQTSLKTRLTISKDTSKNQVVLTMTNVHPVDTATYYCARISSHHGSSWCTTFDYWGQGALVTVSAGGSSGQVQLVQSGAEVKKPGSSVKVSCKVSGGTFSDSAVSWVRQAPGQGLEWMGRIIPIFSTIEYAQNFQGRVTITADESTTTVYMELSYLGLEDTAVYYCARDRPIAVEYTGNWFDPWGQGTLVTVSSASTKGPSVFPLAPSSKSTSGGTAALGCLVKDYFPEPVTVSWNSGALTSGVHTFPAVLQSSGLYSLSSVVTVPSSSLGTQTYICNVNHKPSNTKVDKRVEPKSCDKTHTCPPCPAPEFEGGPSVFLFPPKPKDTLYITREPEVTCVVVDVSHEDPEVKFNWYVDGVEVHNAKTKPREEQYNSTYRVVSVLTVLHQDWLNGKEYKCKVSNKALPASIEKTISKAKGQPREPQVCTLPPSREEMTKNQVSLSCAVKGFYPSDIAVEWESNGQPENNYKTTPPVLDSDGSFFLVSKLTVDKSRWQQGNVFSCSVMHEALHNHYTQKSLSLSPGK

SEQ ID NO: 913 - protein, 941 aa, synthetic construct
EIVLTQSPGTLSLSPGETATLSCRASQSFSSDLAWYQQKPGQAPRLLIYGASSRATGIPDRFSGSGSGTDFTLTISRLEPADFAVYYCQQYGSSPPVTFGGGTKVEIKRTVAAPSVFIFPPSDEQLKSGTASVVCLLNNFYPREAKVQWKVDNALQSGNSQESVTEQDSKDSTYSLSSTLTLSKADYEKHKVYACEVTHQGLSSPVTKSFNRGECGGGGSGGGGSGGGGSDTVMTQSPLSLPVTPGEPASISCRSSQSLLNSNGYNYLDWYVQKPGQSPQLLIYLGSNRASGVPDRFSGSGSGTDFTLKISRVEAEDVGVYYCMQPLQTPLFTFGPGTKVEIKGGGGSGGSGSGGGGSASGSGQVTLRESGPALVKPTQTLTLTCTFSGFSLSTRGVCVSWIRQPPGKALEWLAFIDWDDDKYYQTSLKTRLTISKDTSKNQVVLTMTNVHPVDTATYYCARISSHHGSSWCTTFDYWGQGALVTVSAGGSSGEVQLVESGGGLIQPGGSLRLSCAASGVIVSYNYMNWVRQAPGKGLEWVSVIYSGGSTFYADSVRGRFTISRDNSKNTLYLQMNSLRAEDTAVYYCARDLGPAGAFDIWGLGTMVTVSSASTKGPSVFPLAPSSKSTSGGTAALGCLVKDYFPEPVTVSWNSGALTSGVHTFPAVLQSSGLYSLSSVVTVPSSSLGTQTYICNVNHKPSNTKVDKRVEPKSCDKTHTCPPCPAPEFEGGPSVFLFPPKPKDTLYITREPEVTCVVVDVSHEDPEVKFNWYVDGVEVHNAKTKPREEQYNSTYRVVSVLTVLHQDWLNGKEYKCKVSNKALPASIEKTISKAKGQPREPQVYTLPPCREEMTKNQVSLWCLVKGFYPSDIAVEWESNGQPENNYKTTPPVLDSDGSFFLYSKLTVDKSRWQQGNVFSCSVMHEALHNHYTQKSLSLSPGK

SEQ ID NO: 914 - protein, 949 aa, synthetic construct
SYVLTQPPSVSVAPGQTARITCGGNNIGTKSVHWYQQKPGQAPVLVISSDSDRPSGVPDRFSGSNSGNTATLTISRVEAGDEADYYCHVWDSSSDHWVFGGGTKLTVLRTVAAPSVFIFPPSDEQLKSGTASVVCLLNNFYPREAKVQWKVDNALQSGNSQESVTEQDSKDSTYSLSSTLTLSKADYEKHKVYACEVTHQGLSSPVTKSFNRGECGGGGSGGGGSGGGGSDVQMTQSPSSLSASVGDRVTITCRASQTIVGYLNWYQQQPGRAPKLLIYAASNLQSGVPPRFSGSGSGTDFTLTISDLQPEDFATYYCQQSYLTPPNTFGQGTKLEIKGGGGSGGSGSGGGGSASGSGQVQLVQSGAEVKKPGSSVKVSCKVSGGTFSDSAVSWVRQAPGQGLEWMGRIIPIFSTIEYAQNFQGRVTITADESTTTVYMELSYLGLEDTAVYYCARDRPIAVEYTGNWFDPWGQGTLVTVSSGGSSGEVQLVESGGGRVKPGGSLRLSCAASGFTFSSYRMNWVRQAPGKGLEWVSSISSGSSYIYFADSVKGRFTISRDNAKNSLFLRMNNLRVEDTAVYYCARAPTLRHSSGWYDPPGTENSSFDLWGRGTLVTVSSASTKGPSVFPLAPSSKSTSGGTAALGCLVKDYFPEPVTVSWNSGALTSGVHTFPAVLQSSGLYSLSSVVTVPSSSLGTQTYICNVNHKPSNTKVDKRVEPKSCDKTHTCPPCPAPEFEGGPSVFLFPPKPKDTLYITREPEVTCVVVDVSHEDPEVKFNWYVDGVEVHNAKTKPREEQYNSTYRVVSVLTVLHQDWLNGKEYKCKVSNKALPASIEKTISKAKGQPREPQVCTLPPSREEMTKNQVSLSCAVKGFYPSDIAVEWESNGQPENNYKTTPPVLDSDGSFFLVSKLTVDKSRWQQGNVFSCSVMHEALHNHYTQKSLSLSPGK

SEQ ID NO: 915 - protein, 943 aa, synthetic construct; identical to SEQ ID NO: 632

SEQ ID NO: 916 - protein, 937 aa, synthetic construct
DVQMTQSPSSLSASVGDRVTITCRASQTIVGYLNWYQQQPGRAPKLLIYAASNLQSGVPPRFSGSGSGTDFTLTISDLQPEDFATYYCQQSYLTPPNTFGQGTKLEIKRTVAAPSVFIFPPSDEQLKSGTASVVCLLNNFYPREAKVQWKVDNALQSGNSQESVTEQDSKDSTYSLSSTLTLSKADYEKHKVYACEVTHQGLSSPVTKSFNRGECGGGGSGGGGSGGGGSEIVLTQSPATLSVSPGERATLSCRASQSVSSLLAWYQRKPGQPPRLLIYGASTRATGIPARFSGSGSGTEFTLTISSLQSEDFAVYYCQQYNDWWTFGQGTKVEIKGGGGSGGSGSGGGGSASGSGQVHLVQSGAEVKKPGASVKVSCKASGYTFTDYFIHWVRQAPGQGLEWMGWINPDDGDTNYAQKFHGWVAMTRDTSINTAYMELSRLKSNDTAVYYCARGTFSLRGFDWFDPWGQGTLVTVSSGGSSGQVQLVQSGAEVKKPGSSVKVSCKVSGGTFSDSAVSWVRQAPGQGLEWMGRIIPIFSTIEYAQNFQGRVTITADESTTTVYMELSYLGLEDTAVYYCARDRPIAVEYTGNWFDPWGQGTLVTVSSASTKGPSVFPLAPSSKSTSGGTAALGCLVKDYFPEPVTVSWNSGALTSGVHTFPAVLQSSGLYSLSSVVTVPSSSLGTQTYICNVNHKPSNTKVDKRVEPKSCDKTHTCPPCPAPEFEGGPSVFLFPPKPKDTLYITREPEVTCVVVDVSHEDPEVKFNWYVDGVEVHNAKTKPREEQYNSTYRVVSVLTVLHQDWLNGKEYKCKVSNKALPASIEKTISKAKGQPREPQVCTLPPSREEMTKNQVSLSCAVKGFYPSDIAVEWESNGQPENNYKTTPPVLDSDGSFFLVSKLTVDKSRWQQGNVFSCSVMHEALHNHYTQKSLSLSPGK

SEQ ID NO: 917 - protein, 943 aa, synthetic construct; identical to SEQ ID NO: 632

SEQ ID NO: 918 - protein, 937 aa, synthetic construct
DVQMTQSPSSLSASVGDRVTITCRASQTIVGYLNWYQQQPGRAPKLLIYAASNLQSGVPPRFSGSGSGTDFTLTISDLQPEDFATYYCQQSYLTPPNTFGQGTKLEIKRTVAAPSVFIFPPSDEQLKSGTASVVCLLNNFYPREAKVQWKVDNALQSGNSQESVTEQDSKDSTYSLSSTLTLSKADYEKHKVYACEVTHQGLSSPVTKSFNRGECGGGGSGGGGSGGGGSEIVLTQSPATLSVSPGERATLSCRASQSVSSLLAWYQRKPGQPPRLLIYGASTRATGIPARFSGSGSGTEFTLTISSLQSEDFAVYYCQQYNDWWTFGQGTKVEIKGGGGSGGSGSGGGGSASGSGQVHLVQSGAEVKKPGASVKVSCKASGYTFTDYFIHWVRQAPGQGLEWMGWINPDDGDTNYAQKFHGWVAMTRDTSINTAYMELSRLKSQDTAVYYCARGTFSLRGFDWFDPWGQGTLVTVSSGGSSGQVQLVQSGAEVKKPGSSVKVSCKVSGGTFSDSAVSWVRQAPGQGLEWMGRIIPIFSTIEYAQNFQGRVTITADESTTTVYMELSYLGLEDTAVYYCARDRPIAVEYTGNWFDPWGQGTLVTVSSASTKGPSVFPLAPSSKSTSGGTAALGCLVKDYFPEPVTVSWNSGALTSGVHTFPAVLQSSGLYSLSSVVTVPSSSLGTQTYICNVNHKPSNTKVDKRVEPKSCDKTHTCPPCPAPEFEGGPSVFLFPPKPKDTLYITREPEVTCVVVDVSHEDPEVKFNWYVDGVEVHNAKTKPREEQYNSTYRVVSVLTVLHQDWLNGKEYKCKVSNKALPASIEKTISKAKGQPREPQVCTLPPSREEMTKNQVSLSCAVKGFYPSDIAVEWESNGQPENNYKTTPPVLDSDGSFFLVSKLTVDKSRWQQGNVFSCSVMHEALHNHYTQKSLSLSPGK

SEQ ID NO: 919 - protein, 931 aa, synthetic construct
EIVLTQSPGTLSLSPGETATLSCRASQSFSSDLAWYQQKPGQAPRLLIYGASSRATGIPDRFSGSGSGTDFTLTISRLEPADFAVYYCQQYGSSPPVTFGGGTKVEIKRTVAAPSVFIFPPSDEQLKSGTASVVCLLNNFYPREAKVQWKVDNALQSGNSQESVTEQDSKDSTYSLSSTLTLSKADYEKHKVYACEVTHQGLSSPVTKSFNRGECGGGGSGGGGSGGGGSEIVLTQSPATLSVSPGERATLSCRASQSVSSLLAWYQRKPGQPPRLLIYGASTRATGIPARFSGSGSGTEFTLTISSLQSEDFAVYYCQQYNDWWTFGQGTKVEIKGGGGSGGSGSGGGGSASGSGQVHLVQSGAEVKKPGASVKVSCKASGYTFTDYFIHWVRQAPGQGLEWMGWINPDDGDTNYAQKFHGWVAMTRDTSINTAYMELSRLKSNDTAVYYCARGTFSLRGFDWFDPWGQGTLVTVSSGGSSGEVQLVESGGGLIQPGGSLRLSCAASGVIVSYNYMNWVRQAPGKGLEWVSVIYSGGSTFYADSVRGRFTISRDNSKNTLYLQMNSLRAEDTAVYYCARDLGPAGAFDIWGLGTMVTVSSASTKGPSVFPLAPSSKSTSGGTAALGCLVKDYFPEPVTVSWNSGALTSGVHTFPAVLQSSGLYSLSSVVTVPSSSLGTQTYICNVNHKPSNTKVDKRVEPKSCDKTHTCPPCPAPEFEGGPSVFLFPPKPKDTLYITREPEVTCVVVDVSHEDPEVKFNWYVDGVEVHNAKTKPREEQYNSTYRVVSVLTVLHQDWLNGKEYKCKVSNKALPASIEKTISKAKGQPREPQVYTLPPCREEMTKNQVSLWCLVKGFYPSDIAVEWESNGQPENNYKTTPPVLDSDGSFFLYSKLTVDKSRWQQGNVFSCSVMHEALHNHYTQKSLSLSPGK

SEQ ID NO: 920 - protein, 949 aa, synthetic construct; identical to SEQ ID NO: 914

SEQ ID NO: 921 - protein, 931 aa, synthetic construct
EIVLTQSPGTLSLSPGETATLSCRASQSFSSDLAWYQQKPGQAPRLLIYGASSRATGIPDRFSGSGSGTDFTLTISRLEPADFAVYYCQQYGSSPPVTFGGGTKVEIKRTVAAPSVFIFPPSDEQLKSGTASVVCLLNNFYPREAKVQWKVDNALQSGNSQESVTEQDSKDSTYSLSSTLTLSKADYEKHKVYACEVTHQGLSSPVTKSFNRGECGGGGSGGGGSGGGGSEIVLTQSPATLSVSPGERATLSCRASQSVSSLLAWYQRKPGQPPRLLIYGASTRATGIPARFSGSGSGTEFTLTISSLQSEDFAVYYCQQYNDWWTFGQGTKVEIKGGGGSGGSGSGGGGSASGSGQVHLVQSGAEVKKPGASVKVSCKASGYTFTDYFIHWVRQAPGQGLEWMGWINPDDGDTNYAQKFHGWVAMTRDTSINTAYMELSRLKSQDTAVYYCARGTFSLRGFDWFDPWGQGTLVTVSSGGSSGEVQLVESGGGLIQPGGSLRLSCAASGVIVSYNYMNWVRQAPGKGLEWVSVIYSGGSTFYADSVRGRFTISRDNSKNTLYLQMNSLRAEDTAVYYCARDLGPAGAFDIWGLGTMVTVSSASTKGPSVFPLAPSSKSTSGGTAALGCLVKDYFPEPVTVSWNSGALTSGVHTFPAVLQSSGLYSLSSVVTVPSSSLGTQTYICNVNHKPSNTKVDKRVEPKSCDKTHTCPPCPAPEFEGGPSVFLFPPKPKDTLYITREPEVTCVVVDVSHEDPEVKFNWYVDGVEVHNAKTKPREEQYNSTYRVVSVLTVLHQDWLNGKEYKCKVSNKALPASIEKTISKAKGQPREPQVYTLPPCREEMTKNQVSLWCLVKGFYPSDIAVEWESNGQPENNYKTTPPVLDSDGSFFLYSKLTVDKSRWQQGNVFSCSVMHEALHNHYTQKSLSLSPGK

SEQ ID NO: 922 - protein, 949 aa, synthetic construct; identical to SEQ ID NO: 914

SEQ ID NO: 923 - protein, 935 aa, synthetic construct; identical to SEQ ID NO: 720

SEQ ID NO: 924 - protein, 945 aa, synthetic construct; identical to SEQ ID NO: 753

SEQ ID NO: 925 - protein, 935 aa, synthetic construct; identical to SEQ ID NO: 720

SEQ ID NO: 926 - protein, 945 aa, synthetic construct
EIVLTQSPATLSVSPGERATLSCRASQSVSSLLAWYQRKPGQPPRLLIYGASTRATGIPARFSGSGSGTEFTLTISSLQSEDFAVYYCQQYNDWWTFGQGTKVEIKRTVAAPSVFIFPPSDEQLKSGTASVVCLLNNFYPREAKVQWKVDNALQSGNSQESVTEQDSKDSTYSLSSTLTLSKADYEKHKVYACEVTHQGLSSPVTKSFNRGECGGGGSGGGGSGGGGSSYVLTQPPSVSVAPGQTARITCGGNNIGTKSVHWYQQKPGQAPVLVISSDSDRPSGVPDRFSGSNSGNTATLTISRVEAGDEADYYCHVWDSSSDHWVFGGGTKLTVLGGGGSGGSGSGGGGSASGSGEVQLVESGGGRVKPGGSLRLSCAASGFTFSSYRMNWVRQAPGKGLEWVSSISSGSSYIYFADSVKGRFTISRDNAKNSLFLRMNNLRVEDTAVYYCARAPTLRHSSGWYDPPGTENSSFDLWGRGTLVTVSSGGSSGQVHLVQSGAEVKKPGASVKVSCKASGYTFTDYFIHWVRQAPGQGLEWMGWINPDDGDTNYAQKFHGWVAMTRDTSINTAYMELSRLKSQDTAVYYCARGTFSLRGFDWFDPWGQGTLVTVSSASTKGPSVFPLAPSSKSTSGGTAALGCLVKDYFPEPVTVSWNSGALTSGVHTFPAVLQSSGLYSLSSVVTVPSSSLGTQTYICNVNHKPSNTKVDKRVEPKSCDKTHTCPPCPAPEFEGGPSVFLFPPKPKDTLYITREPEVTCVVVDVSHEDPEVKFNWYVDGVEVHNAKTKPREEQYNSTYRVVSVLTVLHQDWLNGKEYKCKVSNKALPASIEKTISKAKGQPREPQVCTLPPSREEMTKNQVSLSCAVKGFYPSDIAVEWESNGQPENNYKTTPPVLDSDGSFFLVSKLTVDKSRWQQGNVFSCSVMHEALHNHYTQKSLSLSPGK

SEQ ID NO: 927 - DNA, 2808 bp, synthetic construct
  source 1..2808: mol_type = other DNA
gacgtgcagatgacacagagcccttctagcctgtctgccagcgtgggcgacagagtgaccatcacatgtagagccagccagaccatcgtgggctacctgaactggtatcagcagcagcctggcagagcccctaagctgctgatctacgccgccagcaatctgcagtctggcgtgccacctagattttccggctctggcagcggcaccgatttcaccctgacaatcagcgacctgcagcctgaggacttcgccacctactactgccagcagagctacctgacacctcctaacacctttggccagggcaccaagctggaaatcaagcgtacggtggccgctcccagcgtgttcatcttcccacctagcgacgagcagctgaagtccggcacagcctctgtcgtgtgcctgctgaacaacttctacccccgcgaggccaaagtgcagtggaaggtggacaacgccctgcagagcggcaacagccaggaaagcgtgaccgagcaggacagcaaggactccacctacagcctgagcagcaccctgacactgagcaaggccgactacgagaagcacaaggtgtacgcctgcgaagtgacccaccagggcctgtctagccccgtgaccaagagcttcaaccggggcgagtgtggcggcggaggatctggcggaggtggaagcggaggcggtggaagcgagatcgtgctgacacagagccctggcacactgtcactgtctccaggcgaaacagccacactgagctgtagagccagccagagcttcagcagcgacctggcttggtatcagcagaagcctggacaggcccctcggctgttgatctatggcgcctcttctagagccacaggcatccccgatagattcagcggctctggcagcggcaccgatttcaccctgacaatcagcagactggaacccgccgacttcgccgtgtactactgtcagcagtacggcagcagccctcctgtgacatttggcggcggaacaaaggtggaaatcaaaggaggtggtggctctggcggatctgggagtggtggcggaggctctgcttctggatctggagaagtgcagctggtggaatcaggcggcggactgattcaacctggcggctctctgagactgtcttgtgctgcttctggcgtgatcgtgtcctacaactacatgaactgggtccgacaggctcccggcaaaggccttgaatgggtgtccgtgatctacagcggcggcagcaccttttacgccgattctgtgcggggcagattcaccatcagccgggacaacagcaagaacaccctgtacctgcagatgaacagcctgagagccgaggacaccgctgtgtactattgcgccagagatctgggacctgccggcgcttttgatatctggggcctgggcacaatggtcaccgtgtctagcggaggcagctccgggcaggttcagctggttcagtctggcgccgaagtgaagaaacctggcagcagcgtgaaggtgtcctgcaaagtgtctggcggcaccttcagcgatagcgccgtgtcttgggttcgacaggctcctggacaaggcctggaatggatgggcagaatcatccccatcttcagcaccatcgagtacgcccagaacttccagggcagagtgaccatcacagccgacgagagcaccaccaccgtgtacatggaactgagctacctgggcctcgaggacaccgccgtgtactactgtgccagagacagacctatcgccgtcgagtacaccggcaattggttcgatccttggggccagggcacactggtcacagtctcttctgcttcgaccaagggcccatccgtgtttcctctggctcccagcagcaagtctacaagcggaggaacagccgctctgggctgcctggtcaaggattactttcccgagcctgtgaccgtgtcctggaattctggcgctctgacaagcggcgtgcacacctttccagctgtgctgcaaagcagcggcctgtactctctgagcagcgtggtcacagtgcctagctctagcctgggcacccagacctacatctgcaatgtgaaccacaagcctagcaacaccaaggtggacaagaaggtggaacccaagagctgcgataagacccacacatgtcctccatgtcctgctccagaactgctcggcggcccttctgtgttcctgtttcctccaaagcctaaggacaccctgatgatcagcagaacccctgaagtgacctgcgtggtggtggatgtgtctcacgaggaccccgaagtgaagttcaattggtacgtggacggcgtggaagtgcacaacgccaagaccaagcctagagaggaacagtacaacagcacctacagagtggtgtccgtgctgaccgtgctgcaccaggattggctgaacggcaaagagtacaagtgcaaggtgtccaacaaggccctgcctgctcctatcgagaaaaccatcagcaaggccaagggccagcctagggaaccccaggtttacacccttcctccatgccgggatgagctgaccaagaaccaggtgtccctgtggtgtctcgtgaagggcttctaccccagcgacattgccgtggaatgggagagcaatggccagcctgagaacaactacaagacaacccctcctgtgctggacagcgacggctcattcttcctgtacagcaagctgacagtcgacaagtccagatggcagcagggcaacgtgttcagttgcagcgtgctgcacgaggccctgcacgctcactacacccagaagtccctgagcctgtctcctggatagtga

SEQ ID NO: 928 - DNA, 2868 bp, synthetic construct
  source 1..2868: mol_type = other DNA
agctacgtgctgacacagcctccatccgtgtctgtggctccaggacagaccgccagaatcacatgcggcggcaacaacatcggcaccaagagcgtgcactggtatcagcagaagcctggacaggcccctgtgctcgtgatcagcagcgatagcgatagacctagcggcgtgcccgatagattcagcggcagcaatagcggcaacaccgccacactgaccatcagcagagttgaggctggcgacgaggccgactactactgtcacgtgtgggatagcagcagcgaccactgggttttcggcggaggcacaaagctgacagtgctgcgtacggtggccgctcccagcgtgttcatcttcccacctagcgacgagcagctgaagtccggcacagcctctgtcgtgtgcctgctgaacaacttctacccccgcgaggccaaagtgcagtggaaggtggacaacgccctgcagagcggcaacagccaggaaagcgtgaccgagcaggacagcaaggactccacctacagcctgagcagcaccctgacactgagcaaggccgactacgagaagcacaaggtgtacgcctgcgaagtgacccaccagggcctgtctagccccgtgaccaagagcttcaaccggggcgagtgtggcggcggaggatctggcggaggtggaagcggaggcggtggaagcgacaccgtgatgacacagagccctctgagcctgcctgtgacacctggcgaacctgccagcatcagctgtagaagcagccagagcctgctgaacagcaacggctacaactacctggattggtacgtgcagaagcccggccagtctcctcagctgctgatctacctgggcagcaatagagccagcggcgtgcccgatagattttctggctctggcagcggcaccgacttcaccctgaagatctctagagtggaagccgaggacgtgggcgtgtactactgtatgcagcctctgcagacccctctgttcacatttggccctggcaccaaggtggaaatcaaaggaggtggtggctctggcggatctgggagtggtggcggaggctctgcttctggatctggacaagtgacactgagagagtctggccccgctctggtcaagcctacacagaccctgacactgacctgcaccttcagcggcttcagcctgtctactagaggcgtgtgcgtgtcctggatcagacagcctcctggaaaggccctggaatggctggccttcatcgactgggacgacgacaagtactaccagaccagcctgaaaacccggctgaccatcagcaaggacaccagcaagaaccaggtggtgctgaccatgaccaacgtgcaccctgtggataccgccacctactactgcgccagaatcagctctcaccacggctccagctggtgtaccaccttcgattattggggccagggcgctctcgtgacagtttctgctggaggcagctccggggaggtgcagctggttgaatctggcggcggaagagtgaagcctggcggatctctgagactgagctgtgccgccagcggcttcaccttcagcagctacagaatgaactgggtccgacaggcccctggcaaaggccttgaatgggtgtccagcatcagcagcggcagctcctacatctacttcgccgacagcgtgaagggcagattcaccatctccagagacaacgccaagaacagcctgttcctgcggatgaacaacctgagagtggaagataccgccgtgtactactgcgccagagcacccacactgagacacagcagcggatggtacgatcctcctggcaccgagaacagcagcttcgatctgtggggcagaggcaccctggtcacagtctcttctgcttcgaccaagggcccatccgtgtttcctctggctcccagcagcaagtctacaagcggaggaacagccgctctgggctgcctggtcaaggattactttcccgagcctgtgaccgtgtcctggaattctggcgctctgacaagcggcgtgcacacctttccagctgtgctgcaaagcagcggcctgtactctctgagcagcgtggtcacagtgcctagctctagcctgggcacccagacctacatctgcaatgtgaaccacaagcctagcaacaccaaggtggacaagaaggtggaacccaagagctgcgataagacccacacatgtcctccatgtcctgctccagaactgctcggcggcccttctgtgttcctgtttcctccaaagcctaaggacaccctgatgatcagcagaacccctgaagtgacctgcgtggtggtggatgtgtctcacgaggaccccgaagtgaagttcaattggtacgtggacggcgtggaagtgcacaacgccaagaccaagcctagagaggaacagtacaacagcacctacagagtggtgtccgtgctgaccgtgctgcaccaggattggctgaacggcaaagagtacaagtgcaaggtgtccaacaaggccctgcctgctcctatcgagaaaaccatcagcaaggccaagggccagcctagggaaccccaggtttgtacccttcctccaagccgggatgagctgaccaagaaccaggtgtccctgagctgtgccgtgaagggcttctaccccagcgacattgccgtggaatgggagagcaatggccagcctgagaacaactacaagacaacccctcctgtgctggacagcgacggctcattcttcctggtgagcaagctgacagtcgacaagtccagatggcagcagggcaacgtgttcagttgcagcgtgctgcacgaggccctgcacgctcactacacccagaagtccctgagcctgtctcctggatagtga

SEQ ID NO: 929 - DNA, 2808 bp, synthetic construct; identical to SEQ ID NO: 927
  source 1..2808: mol_type = other DNA

SEQ ID NO: 930 - DNA, 2868 bp, synthetic construct
  source 1..2868: mol_type = other DNA
gacaccgtgatgacacagagccctctgagcctgcctgtgacacctggcgaacctgccagcatcagctgtagaagcagccagagcctgctgaacagcaacggctacaactacctggattggtacgtgcagaagcccggccagtctcctcagctgctgatctacctgggcagcaatagagccagcggcgtgcccgatagattttctggctctggcagcggcaccgacttcaccctgaagatctctagagtggaagccgaggacgtgggcgtgtactactgtatgcagcctctgcagacccctctgttcacatttggccctggcaccaaggtggaaatcaaacgtacggtggccgctcccagcgtgttcatcttcccacctagcgacgagcagctgaagtccggcacagcctctgtcgtgtgcctgctgaacaacttctacccccgcgaggccaaagtgcagtggaaggtggacaacgccctgcagagcggcaacagccaggaaagcgtgaccgagcaggacagcaaggactccacctacagcctgagcagcaccctgacactgagcaaggccgactacgagaagcacaaggtgtacgcctgcgaagtgacccaccagggcctgtctagccccgtgaccaagagcttcaaccggggcgagtgtggcggcggaggatctggcggaggtggaagcggaggcggtggaagcagctacgtgctgacacagcctccatccgtgtctgtggctccaggacagaccgccagaatcacatgcggcggcaacaacatcggcaccaagagcgtgcactggtatcagcagaagcctggacaggcccctgtgctcgtgatcagcagcgatagcgatagacctagcggcgtgcccgatagattcagcggcagcaatagcggcaacaccgccacactgaccatcagcagagttgaggctggcgacgaggccgactactactgtcacgtgtgggatagcagcagcgaccactgggttttcggcggaggcacaaagctgacagtgctgggaggtggtggctctggcggatctgggagtggtggcggaggctctgcttctggatctggagaggtgcagctggttgaatctggcggcggaagagtgaagcctggcggatctctgagactgagctgtgccgccagcggcttcaccttcagcagctacagaatgaactgggtccgacaggcccctggcaaaggccttgaatgggtgtccagcatcagcagcggcagctcctacatctacttcgccgacagcgtgaagggcagattcaccatctccagagacaacgccaagaacagcctgttcctgcggatgaacaacctgagagtggaagataccgccgtgtactactgcgccagagcacccacactgagacacagcagcggatggtacgatcctcctggcaccgagaacagcagcttcgatctgtggggcagaggcaccctggtcacagtctcttctggaggcagctccgggcaagtgacactgagagagtctggccccgctctggtcaagcctacacagaccctgacactgacctgcaccttcagcggcttcagcctgtctactagaggcgtgtgcgtgtcctggatcagacagcctcctggaaaggccctggaatggctggccttcatcgactgggacgacgacaagtactaccagaccagcctgaaaacccggctgaccatcagcaaggacaccagcaagaaccaggtggtgctgaccatgaccaacgtgcaccctgtggataccgccacctactactgcgccagaatcagctctcaccacggctccagctggtgtaccaccttcgattattggggccagggcgctctcgtgacagtttctgctgcttcgaccaagggcccatccgtgtttcctctggctcccagcagcaagtctacaagcggaggaacagccgctctgggctgcctggtcaaggattactttcccgagcctgtgaccgtgtcctggaattctggcgctctgacaagcggcgtgcacacctttccagctgtgctgcaaagcagcggcctgtactctctgagcagcgtggtcacagtgcctagctctagcctgggcacccagacctacatctgcaatgtgaaccacaagcctagcaacaccaaggtggacaagaaggtggaacccaagagctgcgataagacccacacatgtcctccatgtcctgctccagaactgctcggcggcccttctgtgttcctgtttcctccaaagcctaaggacaccctgatgatcagcagaacccctgaagtgacctgcgtggtggtggatgtgtctcacgaggaccccgaagtgaagttcaattggtacgtggacggcgtggaagtgcacaacgccaagaccaagcctagagaggaacagtacaacagcacctacagagtggtgtccgtgctgaccgtgctgcaccaggattggctgaacggcaaagagtacaagtgcaaggtgtccaacaaggccctgcctgctcctatcgagaaaaccatcagcaaggccaagggccagcctagggaaccccaggtttgtacccttcctccaagccgggatgagctgaccaagaaccaggtgtccctgagctgtgccgtgaagggcttctaccccagcgacattgccgtggaatgggagagcaatggccagcctgagaacaactacaagacaacccctcctgtgctggacagcgacggctcattcttcctggtgagcaagctgacagtcgacaagtccagatggcagcagggcaacgtgttcagttgcagcgtgctgcacgaggccctgcacgctcactacacccagaagtccctgagcctgtctcctggatagtga

SEQ ID NO: 931 - DNA, 2832 bp, synthetic construct; identical to SEQ ID NO: 609
  source 1..2832: mol_type = other DNA

SEQ ID NO: 932 - DNA, 2844 bp, synthetic construct
  source 1..2844: mol_type = other DNA
gacaccgtgatgacacagagccctctgagcctgcctgtgacacctggcgaacctgccagcatcagctgtagaagcagccagagcctgctgaacagcaacggctacaactacctggattggtacgtgcagaagcccggccagtctcctcagctgctgatctacctgggcagcaatagagccagcggcgtgcccgatagattttctggctctggcagcggcaccgacttcaccctgaagatctctagagtggaagccgaggacgtgggcgtgtactactgtatgcagcctctgcagacccctctgttcacatttggccctggcaccaaggtggaaatcaaacgtacggtggccgctcccagcgtgttcatcttcccacctagcgacgagcagctgaagtccggcacagcctctgtcgtgtgcctgctgaacaacttctacccccgcgaggccaaagtgcagtggaaggtggacaacgccctgcagagcggcaacagccaggaaagcgtgaccgagcaggacagcaaggactccacctacagcctgagcagcaccctgacactgagcaaggccgactacgagaagcacaaggtgtacgcctgcgaagtgacccaccagggcctgtctagccccgtgaccaagagcttcaaccggggcgagtgtggcggcggaggatctggcggaggtggaagcggaggcggtggaagcgacgtgcagatgacacagagcccttctagcctgtctgccagcgtgggcgacagagtgaccatcacatgtagagccagccagaccatcgtgggctacctgaactggtatcagcagcagcctggcagagcccctaagctgctgatctacgccgccagcaatctgcagtctggcgtgccacctagattttccggctctggcagcggcaccgatttcaccctgacaatcagcgacctgcagcctgaggacttcgccacctactactgccagcagagctacctgacacctcctaacacctttggccagggcaccaagctggaaatcaagggaggtggtggctctggcggatctgggagtggtggcggaggctctgcttctggatctggacaggttcagctggttcagtctggcgccgaagtgaagaaacctggcagcagcgtgaaggtgtcctgcaaagtgtctggcggcaccttcagcgatagcgccgtgtcttgggttcgacaggctcctggacaaggcctggaatggatgggcagaatcatccccatcttcagcaccatcgagtacgcccagaacttccagggcagagtgaccatcacagccgacgagagcaccaccaccgtgtacatggaactgagctacctgggcctcgaggacaccgccgtgtactactgtgccagagacagacctatcgccgtcgagtacaccggcaattggttcgatccttggggccagggcacactggtcacagtctcttctggaggcagctccgggcaagtgacactgagagagtctggccccgctctggtcaagcctacacagaccctgacactgacctgcaccttcagcggcttcagcctgtctactagaggcgtgtgcgtgtcctggatcagacagcctcctggaaaggccctggaatggctggccttcatcgactgggacgacgacaagtactaccagaccagcctgaaaacccggctgaccatcagcaaggacaccagcaagaaccaggtggtgctgaccatgaccaacgtgcaccctgtggataccgccacctactactgcgccagaatcagctctcaccacggctccagctggtgtaccaccttcgattattggggccagggcgctctcgtgacagtttctgctgcttcgaccaagggcccatccgtgtttcctctggctcccagcagcaagtctacaagcggaggaacagccgctctgggctgcctggtcaaggattactttcccgagcctgtgaccgtgtcctggaattctggcgctctgacaagcggcgtgcacacctttccagctgtgctgcaaagcagcggcctgtactctctgagcagcgtggtcacagtgcctagctctagcctgggcacccagacctacatctgcaatgtgaaccacaagcctagcaacaccaaggtggacaagaaggtggaacccaagagctgcgataagacccacacatgtcctccatgtcctgctccagaactgctcggcggcccttctgtgttcctgtttcctccaaagcctaaggacaccctgatgatcagcagaacccctgaagtgacctgcgtggtggtggatgtgtctcacgaggaccccgaagtgaagttcaattggtacgtggacggcgtggaagtgcacaacgccaagaccaagcctagagaggaacagtacaacagcacctacagagtggtgtccgtgctgaccgtgctgcaccaggattggctgaacggcaaagagtacaagtgcaaggtgtccaacaaggccctgcctgctcctatcgagaaaaccatcagcaaggccaagggccagcctagggaaccccaggtttgtacccttcctccaagccgggatgagctgaccaagaaccaggtgtccctgagctgtgccgtgaagggcttctaccccagcgacattgccgtggaatgggagagcaatggccagcctgagaacaactacaagacaacccctcctgtgctggacagcgacggctcattcttcctggtgagcaagctgacagtcgacaagtccagatggcagcagggcaacgtgttcagttgcagcgtgctgcacgaggccctgcacgctcactacacccagaagtccctgagcctgtctcctggatagtga

SEQ ID NO: 933 - DNA, 2832 bp, synthetic construct; identical to SEQ ID NO: 609
  source 1..2832: mol_type = other DNA

SEQ ID NO: 934 - DNA, 2844 bp, synthetic construct
  source 1..2844: mol_type = other DNA
gacgtgcagatgacacagagcccttctagcctgtctgccagcgtgggcgacagagtgaccatcacatgtagagccagccagaccatcgtgggctacctgaactggtatcagcagcagcctggcagagcccctaagctgctgatctacgccgccagcaatctgcagtctggcgtgccacctagattttccggctctggcagcggcaccgatttcaccctgacaatcagcgacctgcagcctgaggacttcgccacctactactgccagcagagctacctgacacctcctaacacctttggccagggcaccaagctggaaatcaagcgtacggtggccgctcccagcgtgttcatcttcccacctagcgacgagcagctgaagtccggcacagcctctgtcgtgtgcctgctgaacaacttctacccccgcgaggccaaagtgcagtggaaggtggacaacgccctgcagagcggcaacagccaggaaagcgtgaccgagcaggacagcaaggactccacctacagcctgagcagcaccctgacactgagcaaggccgactacgagaagcacaaggtgtacgcctgcgaagtgacccaccagggcctgtctagccccgtgaccaagagcttcaaccggggcgagtgtggcggcggaggatctggcggaggtggaagcggaggcggtggaagcgacaccgtgatgacacagagccctctgagcctgcctgtgacacctggcgaacctgccagcatcagctgtagaagcagccagagcctgctgaacagcaacggctacaactacctggattggtacgtgcagaagcccggccagtctcctcagctgctgatctacctgggcagcaatagagccagcggcgtgcccgatagattttctggctctggcagcggcaccgacttcaccctgaagatctctagagtggaagccgaggacgtgggcgtgtactactgtatgcagcctctgcagacccctctgttcacatttggccctggcaccaaggtggaaatcaaaggaggtggtggctctggcggatctgggagtggtggcggaggctctgcttctggatctggacaagtgacactgagagagtctggccccgctctggtcaagcctacacagaccctgacactgacctgcaccttcagcggcttcagcctgtctactagaggcgtgtgcgtgtcctggatcagacagcctcctggaaaggccctggaatggctggccttcatcgactgggacgacgacaagtactaccagaccagcctgaaaacccggctgaccatcagcaaggacaccagcaagaaccaggtggtgctgaccatgaccaacgtgcaccctgtggataccgccacctactactgcgccagaatcagctctcaccacggctccagctggtgtaccaccttcgattattggggccagggcgctctcgtgacagtttctgctggaggcagctccgggcaggttcagctggttcagtctggcgccgaagtgaagaaacctggcagcagcgtgaaggtgtcctgcaaagtgtctggcggcaccttcagcgatagcgccgtgtcttgggttcgacaggctcctggacaaggcctggaatggatgggcagaatcatccccatcttcagcaccatcgagtacgcccagaacttccagggcagagtgaccatcacagccgacgagagcaccaccaccgtgtacatggaactgagctacctgggcctcgaggacaccgccgtgtactactgtgccagagacagacctatcgccgtcgagtacaccggcaattggttcgatccttggggccagggcacactggtcacagtctcttctgcttcgaccaagggcccatccgtgtttcctctggctcccagcagcaagtctacaagcggaggaacagccgctctgggctgcctggtcaaggattactttcccgagcctgtgaccgtgtcctggaattctggcgctctgacaagcggcgtgcacacctttccagctgtgctgcaaagcagcggcctgtactctctgagcagcgtggtcacagtgcctagctctagcctgggcacccagacctacatctgcaatgtgaaccacaagcctagcaacaccaaggtggacaagaaggtggaacccaagagctgcgataagacccacacatgtcctccatgtcctgctccagaactgctcggcggcccttctgtgttcctgtttcctccaaagcctaaggacaccctgatgatcagcagaacccctgaagtgacctgcgtggtggtggatgtgtctcacgaggaccccgaagtgaagttcaattggtacgtggacggcgtggaagtgcacaacgccaagaccaagcctagagaggaacagtacaacagcacctacagagtggtgtccgtgctgaccgtgctgcaccaggattggctgaacggcaaagagtacaagtgcaaggtgtccaacaaggccctgcctgctcctatcgagaaaaccatcagcaaggccaagggccagcctagggaaccccaggtttgtacccttcctccaagccgggatgagctgaccaagaaccaggtgtccctgagctgtgccgtgaagggcttctaccccagcgacattgccgtggaatgggagagcaatggccagcctgagaacaactacaagacaacccctcctgtgctggacagcgacggctcattcttcctggtgagcaagctgacagtcgacaagtccagatggcagcagggcaacgtgttcagttgcagcgtgctgcacgaggccctgcacgctcactacacccagaagtccctgagcctgtctcctggatagtga

SEQ ID NO: 935 - DNA, 2832 bp, synthetic construct
  source 1..2832: mol_type = other DNA
agctacgtgctgacacagcctccatccgtgtctgtggctccaggacagaccgccagaatcacatgcggcggcaacaacatcggcaccaagagcgtgcactggtatcagcagaagcctggacaggcccctgtgctcgtgatcagcagcgatagcgatagacctagcggcgtgcccgatagattcagcggcagcaatagcggcaacaccgccacactgaccatcagcagagttgaggctggcgacgaggccgactactactgtcacgtgtgggatagcagcagcgaccactgggttttcggcggaggcacaaagctgacagtgctgcgtacggtggccgctcccagcgtgttcatcttcccacctagcgacgagcagctgaagtccggcacagcctctgtcgtgtgcctgctgaacaacttctacccccgcgaggccaaagtgcagtggaaggtggacaacgccctgcagagcggcaacagccaggaaagcgtgaccgagcaggacagcaaggactccacctacagcctgagcagcaccctgacactgagcaaggccgactacgagaagcacaaggtgtacgcctgcgaagtgacccaccagggcctgtctagccccgtgaccaagagcttcaaccggggcgagtgtggcggcggaggatctggcggaggtggaagcggaggcggtggaagcgagatcgtgctgacacagagccctggcacactgtcactgtctccaggcgaaacagccacactgagctgtagagccagccagagcttcagcagcgacctggcttggtatcagcagaagcctggacaggcccctcggctgttgatctatggcgcctcttctagagccacaggcatccccgatagattcagcggctctggcagcggcaccgatttcaccctgacaatcagcagactggaacccgccgacttcgccgtgtactactgtcagcagtacggcagcagccctcctgtgacatttggcggcggaacaaaggtggaaatcaaaggaggtggtggctctggcggatctgggagtggtggcggaggctctgcttctggatctggagaagtgcagctggtggaatcaggcggcggactgattcaacctggcggctctctgagactgtcttgtgctgcttctggcgtgatcgtgtcctacaactacatgaactgggtccgacaggctcccggcaaaggccttgaatgggtgtccgtgatctacagcggcggcagcaccttttacgccgattctgtgcggggcagattcaccatcagccgggacaacagcaagaacaccctgtacctgcagatgaacagcctgagagccgaggacaccgctgtgtactattgcgccagagatctgggacctgccggcgcttttgatatctggggcctgggcacaatggtcaccgtgtctagcggaggcagctccggggaggtgcagctggttgaatctggcggcggaagagtgaagcctggcggatctctgagactgagctgtgccgccagcggcttcaccttcagcagctacagaatgaactgggtccgacaggcccctggcaaaggccttgaatgggtgtccagcatcagcagcggcagctcctacatctacttcgccgacagcgtgaagggcagattcaccatctccagagacaacgccaagaacagcctgttcctgcggatgaacaacctgagagtggaagataccgccgtgtactactgcgccagagcacccacactgagacacagcagcggatggtacgatcctcctggcaccgagaacagcagcttcgatctgtggggcagaggcaccctggtcacagtctcttctgcttcgaccaagggcccatccgtgtttcctctggctcccagcagcaagtctacaagcggaggaacagccgctctgggctgcctggtcaaggattactttcccgagcctgtgaccgtgtcctggaattctggcgctctgacaagcggcgtgcacacctttccagctgtgctgcaaagcagcggcctgtactctctgagcagcgtggtcacagtgcctagctctagcctgggcacccagacctacatctgcaatgtgaaccacaagcctagcaacaccaaggtggacaagaaggtggaacccaagagctgcgataagacccacacatgtcctccatgtcctgctccagaactgctcggcggcccttctgtgttcctgtttcctccaaagcctaaggacaccctgatgatcagcagaacccctgaagtgacctgcgtggtggtggatgtgtctcacgaggaccccgaagtgaagttcaattggtacgtggacggcgtggaagtgcacaacgccaagaccaagcctagagaggaacagtacaacagcacctacagagtggtgtccgtgctgaccgtgctgcaccaggattggctgaacggcaaagagtacaagtgcaaggtgtccaacaaggccctgcctgctcctatcgagaaaaccatcagcaaggccaagggccagcctagggaaccccaggtttacacccttcctccatgccgggatgagctgaccaagaaccaggtgtccctgtggtgtctcgtgaagggcttctaccccagcgacattgccgtggaatgggagagcaatggccagcctgagaacaactacaagacaacccctcctgtgctggacagcgacggctcattcttcctgtacagcaagctgacagtcgacaagtccagatggcagcagggcaacgtgttcagttgcagcgtgctgcacgaggccctgcacgctcactacacccagaagtccctgagcctgtctcctggatagtga

SEQ ID NO: 936 - DNA, 2844 bp, synthetic construct; identical to SEQ ID NO: 932
  source 1..2844: mol_type = other DNA

SEQ ID NO: 937 - DNA, 2832 bp, synthetic construct; identical to SEQ ID NO: 935
  source 1..2832: mol_type = other DNA

SEQ ID NO: 938 - DNA, 2844 bp, synthetic construct; identical to SEQ ID NO: 934
  source 1..2844: mol_type = other DNA

SEQ ID NO: 939 - DNA, 2826 bp, synthetic construct
  source 1..2826: mol_type = other DNA
gagatcgtgctgacacagagccctggcacactgtcactgtctccaggcgaaacagccacactgagctgtagagccagccagagcttcagcagcgacctggcttggtatcagcagaagcctggacaggcccctcggctgttgatctatggcgcctcttctagagccacaggcatccccgatagattcagcggctctggcagcggcaccgatttcaccctgacaatcagcagactggaacccgccgacttcgccgtgtactactgtcagcagtacggcagcagccctcctgtgacatttggcggcggaacaaaggtggaaatcaaacgtacggtggccgctcccagcgtgttcatcttcccacctagcgacgagcagctgaagtccggcacagcctctgtcgtgtgcctgctgaacaacttctacccccgcgaggccaaagtgcagtggaaggtggacaacgccctgcagagcggcaacagccaggaaagcgtgaccgagcaggacagcaaggactccacctacagcctgagcagcaccctgacactgagcaaggccgactacgagaagcacaaggtgtacgcctgcgaagtgacccaccagggcctgtctagccccgtgaccaagagcttcaaccggggcgagtgtggcggcggaggatctggcggaggtggaagcggaggcggtggaagcgacaccgtgatgacacagagccctctgagcctgcctgtgacacctggcgaacctgccagcatcagctgtagaagcagccagagcctgctgaacagcaacggctacaactacctggattggtacgtgcagaagcccggccagtctcctcagctgctgatctacctgggcagcaatagagccagcggcgtgcccgatagattttctggctctggcagcggcaccgacttcaccctgaagatctctagagtggaagccgaggacgtgggcgtgtactactgtatgcagcctctgcagacccctctgttcacatttggccctggcaccaaggtggaaatcaaaggaggtggtggctctggcggatctgggagtggtggcggaggctctgcttctggatctggacaagtgacactgagagagtctggccccgctctggtcaagcctacacagaccctgacactgacctgcaccttcagcggcttcagcctgtctactagaggcgtgtgcgtgtcctggatcagacagcctcctggaaaggccctggaatggctggccttcatcgactgggacgacgacaagtactaccagaccagcctgaaaacccggctgaccatcagcaaggacaccagcaagaaccaggtggtgctgaccatgaccaacgtgcaccctgtggataccgccacctactactgcgccagaatcagctctcaccacggctccagctggtgtaccaccttcgattattggggccagggcgctctcgtgacagtttctgctggaggcagctccggggaagtgcagctggtggaatcaggcggcggactgattcaacctggcggctctctgagactgtcttgtgctgcttctggcgtgatcgtgtcctacaactacatgaactgggtccgacaggctcccggcaaaggccttgaatgggtgtccgtgatctacagcggcggcagcaccttttacgccgattctgtgcggggcagattcaccatcagccgggacaacagcaagaacaccctgtacctgcagatgaacagcctgagagccgaggacaccgctgtgtactattgcgccagagatctgggacctgccggcgcttttgatatctggggcctgggcacaatggtcaccgtgtctagcgcttcgaccaagggcccatccgtgtttcctctggctcccagcagcaagtctacaagcggaggaacagccgctctgggctgcctggtcaaggattactttcccgagcctgtgaccgtgtcctggaattctggcgctctgacaagcggcgtgcacacctttccagctgtgctgcaaagcagcggcctgtactctctgagcagcgtggtcacagtgcctagctctagcctgggcacccagacctacatctgcaatgtgaaccacaagcctagcaacaccaaggtggacaagaaggtggaacccaagagctgcgataagacccacacatgtcctccatgtcctgctccagaactgctcggcggcccttctgtgttcctgtttcctccaaagcctaaggacaccctgatgatcagcagaacccctgaagtgacctgcgtggtggtggatgtgtctcacgaggaccccgaagtgaagttcaattggtacgtggacggcgtggaagtgcacaacgccaagaccaagcctagagaggaacagtacaacagcacctacagagtggtgtccgtgctgaccgtgctgcaccaggattggctgaacggcaaagagtacaagtgcaaggtgtccaacaaggccctgcctgctcctatcgagaaaaccatcagcaaggccaagggccagcctagggaaccccaggtttacacccttcctccatgccgggatgagctgaccaagaaccaggtgtccctgtggtgtctcgtgaagggcttctaccccagcgacattgccgtggaatgggagagcaatggccagcctgagaacaactacaagacaacccctcctgtgctggacagcgacggctcattcttcctgtacagcaagctgacagtcgacaagtccagatggcagcagggcaacgtgttcagttgcagcgtgctgcacgaggccctgcacgctcactacacccagaagtccctgagcctgtctcctggatagtga

SEQ ID NO: 940 - DNA, 2850 bp, synthetic construct
  source 1..2850: mol_type = other DNA
agctacgtgctgacacagcctccatccgtgtctgtggctccaggacagaccgccagaatcacatgcggcggcaacaacatcggcaccaagagcgtgcactggtatcagcagaagcctggacaggcccctgtgctcgtgatcagcagcgatagcgatagacctagcggcgtgcccgatagattcagcggcagcaatagcggcaacaccgccacactgaccatcagcagagttgaggctggcgacgaggccgactactactgtcacgtgtgggatagcagcagcgaccactgggttttcggcggaggcacaaagctgacagtgctgcgtacggtggccgctcccagcgtgttcatcttcccacctagcgacgagcagctgaagtccggcacagcctctgtcgtgtgcctgctgaacaacttctacccccgcgaggccaaagtgcagtggaaggtggacaacgccctgcagagcggcaacagccaggaaagcgtgaccgagcaggacagcaaggactccacctacagcctgagcagcaccctgacactgagcaaggccgactacgagaagcacaaggtgtacgcctgcgaagtgacccaccagggcctgtctagccccgtgaccaagagcttcaaccggggcgagtgtggcggcggaggatctggcggaggtggaagcggaggcggtggaagcgacgtgcagatgacacagagcccttctagcctgtctgccagcgtgggcgacagagtgaccatcacatgtagagccagccagaccatcgtgggctacctgaactggtatcagcagcagcctggcagagcccctaagctgctgatctacgccgccagcaatctgcagtctggcgtgccacctagattttccggctctggcagcggcaccgatttcaccctgacaatcagcgacctgcagcctgaggacttcgccacctactactgccagcagagctacctgacacctcctaacacctttggccagggcaccaagctggaaatcaagggaggtggtggctctggcggatctgggagtggtggcggaggctctgcttctggatctggacaggttcagctggttcagtctggcgccgaagtgaagaaacctggcagcagcgtgaaggtgtcctgcaaagtgtctggcggcaccttcagcgatagcgccgtgtcttgggttcgacaggctcctggacaaggcctggaatggatgggcagaatcatccccatcttcagcaccatcgagtacgcccagaacttccagggcagagtgaccatcacagccgacgagagcaccaccaccgtgtacatggaactgagctacctgggcctcgaggacaccgccgtgtactactgtgccagagacagacctatcgccgtcgagtacaccggcaattggttcgatccttggggccagggcacactggtcacagtctcttctggaggcagctccggggaggtgcagctggttgaatctggcggcggaagagtgaagcctggcggatctctgagactgagctgtgccgccagcggcttcaccttcagcagctacagaatgaactgggtccgacaggcccctggcaaaggccttgaatgggtgtccagcatcagcagcggcagctcctacatctacttcgccgacagcgtgaagggcagattcaccatctccagagacaacgccaagaacagcctgttcctgcggatgaacaacctgagagtggaagataccgccgtgtactactgcgccagagcacccacactgagacacagcagcggatggtacgatcctcctggcaccgagaacagcagcttcgatctgtggggcagaggcaccctggtcacagtctcttctgcttcgaccaagggcccatccgtgtttcctctggctcccagcagcaagtctacaagcggaggaacagccgctctgggctgcctggtcaaggattactttcccgagcctgtgaccgtgtcctggaattctggcgctctgacaagcggcgtgcacacctttccagctgtgctgcaaagcagcggcctgtactctctgagcagcgtggtcacagtgcctagctctagcctgggcacccagacctacatctgcaatgtgaaccacaagcctagcaacaccaaggtggacaagaaggtggaacccaagagctgcgataagacccacacatgtcctccatgtcctgctccagaactgctcggcggcccttctgtgttcctgtttcctccaaagcctaaggacaccctgatgatcagcagaacccctgaagtgacctgcgtggtggtggatgtgtctcacgaggaccccgaagtgaagttcaattggtacgtggacggcgtggaagtgcacaacgccaagaccaagcctagagaggaacagtacaacagcacctacagagtggtgtccgtgctgaccgtgctgcaccaggattggctgaacggcaaagagtacaagtgcaaggtgtccaacaaggccctgcctgctcctatcgagaaaaccatcagcaaggccaagggccagcctagggaaccccaggtttgtacccttcctccaagccgggatgagctgaccaagaaccaggtgtccctgagctgtgccgtgaagggcttctaccccagcgacattgccgtggaatgggagagcaatggccagcctgagaacaactacaagacaacccctcctgtgctggacagcgacggctcattcttcctggtgagcaagctgacagtcgacaagtccagatggcagcagggcaacgtgttcagttgcagcgtgctgcacgaggccctgcacgctcactacacccagaagtccctgagcctgtctcctggatagtga

SEQ ID NO: 941 - DNA, 2826 bp, synthetic construct; identical to SEQ ID NO: 939
  source 1..2826: mol_type = other DNA

SEQ ID NO: 942 - DNA, 2850 bp, synthetic construct
  source 1..2850: mol_type = other DNA
gacgtgcagatgacacagagcccttctagcctgtctgccagcgtgggcgacagagtgaccatcacatgtagagccagccagaccatcgtgggctacctgaactggtatcagcagcagcctggcagagcccctaagctgctgatctacgccgccagcaatctgcagtctggcgtgccacctagattttccggctctggcagcggcaccgatttcaccctgacaatcagcgacctgcagcctgaggacttcgccacctactactgccagcagagctacctgacacctcctaacacctttggccagggcaccaagctggaaatcaagcgtacggtggccgctcccagcgtgttcatcttcccacctagcgacgagcagctgaagtccggcacagcctctgtcgtgtgcctgctgaacaacttctacccccgcgaggccaaagtgcagtggaaggtggacaacgccctgcagagcggcaacagccaggaaagcgtgaccgagcaggacagcaaggactccacctacagcctgagcagcaccctgacactgagcaaggccgactacgagaagcacaaggtgtacgcctgcgaagtgacccaccagggcctgtctagccccgtgaccaagagcttcaaccggggcgagtgtggcggcggaggatctggcggaggtggaagcggaggcggtggaagcagctacgtgctgacacagcctccatccgtgtctgtggctccaggacagaccgccagaatcacatgcggcggcaacaacatcggcaccaagagcgtgcactggtatcagcagaagcctggacaggcccctgtgctcgtgatcagcagcgatagcgatagacctagcggcgtgcccgatagattcagcggcagcaatagcggcaacaccgccacactgaccatcagcagagttgaggctggcgacgaggccgactactactgtcacgtgtgggatagcagcagcgaccactgggttttcggcggaggcacaaagctgacagtgctgggaggtggtggctctggcggatctgggagtggtggcggaggctctgcttctggatctggagaggtgcagctggttgaatctggcggcggaagagtgaagcctggcggatctctgagactgagctgtgccgccagcggcttcaccttcagcagctacagaatgaactgggtccgacaggcccctggcaaaggccttgaatgggtgtccagcatcagcagcggcagctcctacatctacttcgccgacagcgtgaagggcagattcaccatctccagagacaacgccaagaacagcctgttcctgcggatgaacaacctgagagtggaagataccgccgtgtactactgcgccagagcacccacactgagacacagcagcggatggtacgatcctcctggcaccgagaacagcagcttcgatctgtggggcagaggcaccctggtcacagtctcttctggaggcagctccgggcaggttcagctggttcagtctggcgccgaagtgaagaaacctggcagcagcgtgaaggtgtcctgcaaagtgtctggcggcaccttcagcgatagcgccgtgtcttgggttcgacaggctcctggacaaggcctggaatggatgggcagaatcatccccatcttcagcaccatcgagtacgcccagaacttccagggcagagtgaccatcacagccgacgagagcaccaccaccgtgtacatggaactgagctacctgggcctcgaggacaccgccgtgtactactgtgccagagacagacctatcgccgtcgagtacaccggcaattggttcgatccttggggccagggcacactggtcacagtctcttctgcttcgaccaagggcccatccgtgtttcctctggctcccagcagcaagtctacaagcggaggaacagccgctctgggctgcctggtcaaggattactttcccgagcctgtgaccgtgtcctggaattctggcgctctgacaagcggcgtgcacacctttccagctgtgctgcaaagcagcggcctgtactctctgagcagcgtggtcacagtgcctagctctagcctgggcacccagacctacatctgcaatgtgaaccacaagcctagcaacaccaaggtggacaagaaggtggaacccaagagctgcgataagacccacacatgtcctccatgtcctgctccagaactgctcggcggcccttctgtgttcctgtttcctccaaagcctaaggacaccctgatgatcagcagaacccctgaagtgacctgcgtggtggtggatgtgtctcacgaggaccccgaagtgaagttcaattggtacgtggacggcgtggaagtgcacaacgccaagaccaagcctagagaggaacagtacaacagcacctacagagtggtgtccgtgctgaccgtgctgcaccaggattggctgaacggcaaagagtacaagtgcaaggtgtccaacaaggccctgcctgctcctatcgagaaaaccatcagcaaggccaagggccagcctagggaaccccaggtttgtacccttcctccaagccgggatgagctgaccaagaaccaggtgtccctgagctgtgccgtgaagggcttctaccccagcgacattgccgtggaatgggagagcaatggccagcctgagaacaactacaagacaacccctcctgtgctggacagcgacggctcattcttcctggtgagcaagctgacagtcgacaagtccagatggcagcagggcaacgtgttcagttgcagcgtgctgcacgaggccctgcacgctcactacacccagaagtccctgagcctgtctcctggatagtga

SEQ ID NO: 943 - DNA, 2826 bp, synthetic construct
  source 1..2826: mol_type = other DNA
gacaccgtgatgacacagagccctctgagcctgcctgtgacacctggcgaacctgccagcatcagctgtagaagcagccagagcctgctgaacagcaacggctacaactacctggattggtacgtgcagaagcccggccagtctcctcagctgctgatctacctgggcagcaatagagccagcggcgtgcccgatagattttctggctctggcagcggcaccgacttcaccctgaagatctctagagtggaagccgaggacgtgggcgtgtactactgtatgcagcctctgcagacccctctgttcacatttggccctggcaccaaggtggaaatcaaacgtacggtggccgctcccagcgtgttcatcttcccacctagcgacgagcagctgaagtccggcacagcctctgtcgtgtgcctgctgaacaacttctacccccgcgaggccaaagtgcagtggaaggtggacaacgccctgcagagcggcaacagccaggaaagcgtgaccgagcaggacagcaaggactccacctacagcctgagcagcaccctgacactgagcaaggccgactacgagaagcacaaggtgtacgcctgcgaagtgacccaccagggcctgtctagccccgtgaccaagagcttcaaccggggcgagtgtggcggcggaggatctggcggaggtggaagcggaggcggtggaagcgagatcgtgctgacacagagccctggcacactgtcactgtctccaggcgaaacagccacactgagctgtagagccagccagagcttcagcagcgacctggcttggtatcagcagaagcctggacaggcccctcggctgttgatctatggcgcctcttctagagccacaggcatccccgatagattcagcggctctggcagcggcaccgatttcaccctgacaatcagcagactggaacccgccgacttcgccgtgtactactgtcagcagtacggcagcagccctcctgtgacatttggcggcggaacaaaggtggaaatcaaaggaggtggtggctctggcggatctgggagtggtggcggaggctctgcttctggatctggagaagtgcagctggtggaatcaggcggcggactgattcaacctggcggctctctgagactgtcttgtgctgcttctggcgtgatcgtgtcctacaactacatgaactgggtccgacaggctcccggcaaaggccttgaatgggtgtccgtgatctacagcggcggcagcaccttttacgccgattctgtgcggggcagattcaccatcagccgggacaacagcaagaacaccctgtacctgcagatgaacagcctgagagccgaggacaccgctgtgtactattgcgccagagatctgggacctgccggcgcttttgatatctggggcctgggcacaatggtcaccgtgtctagcggaggcagctccgggcaagtgacactgagagagtctggccccgctctggtcaagcctacacagaccctgacactgacctgcaccttcagcggcttcagcctgtctactagaggcgtgtgcgtgtcctggatcagacagcctcctggaaaggccctggaatggctggccttcatcgactgggacgacgacaagtactaccagaccagcctgaaaacccggctgaccatcagcaaggacaccagcaagaaccaggtggtgctgaccatgaccaacgtgcaccctgtggataccgccacctactactgcgccagaatcagctctcaccacggctccagctggtgtaccaccttcgattattggggccagggcgctctcgtgacagtttctgctgcttcgaccaagggcccatccgtgtttcctctggctcccagcagcaagtctacaagcggaggaacagccgctctgggctgcctggtcaaggattactttcccgagcctgtgaccgtgtcctggaattctggcgctctgacaagcggcgtgcacacctttccagctgtgctgcaaagcagcggcctgtactctctgagcagcgtggtcacagtgcctagctctagcctgggcacccagacctacatctgcaatgtgaaccacaagcctagcaacaccaaggtggacaagaaggtggaacccaagagctgcgataagacccacacatgtcctccatgtcctgctccagaactgctcggcggcccttctgtgttcctgtttcctccaaagcctaaggacaccctgatgatcagcagaacccctgaagtgacctgcgtggtggtggatgtgtctcacgaggaccccgaagtgaagttcaattggtacgtggacggcgtggaagtgcacaacgccaagaccaagcctagagaggaacagtacaacagcacctacagagtggtgtccgtgctgaccgtgctgcaccaggattggctgaacggcaaagagtacaagtgcaaggtgtccaacaaggccctgcctgctcctatcgagaaaaccatcagcaaggccaagggccagcctagggaaccccaggtttacacccttcctccatgccgggatgagctgaccaagaaccaggtgtccctgtggtgtctcgtgaagggcttctaccccagcgacattgccgtggaatgggagagcaatggccagcctgagaacaactacaagacaacccctcctgtgctggacagcgacggctcattcttcctgtacagcaagctgacagtcgacaagtccagatggcagcagggcaacgtgttcagttgcagcgtgctgcacgaggccctgcacgctcactacacccagaagtccctgagcctgtctcctggatagtga

SEQ ID NO: 944 - DNA, 2850 bp, synthetic construct; identical to SEQ ID NO: 940
  source 1..2850: mol_type = other DNA

SEQ ID NO: 945 - DNA, 2826 bp, synthetic construct; identical to SEQ ID NO: 943
  source 1..2826: mol_type = other DNA

SEQ ID NO: 946 - DNA, 2850 bp, synthetic construct; identical to SEQ ID NO: 942
  source 1..2850: mol_type = other DNA

SEQ ID NO: 947 - DNA, 2808 bp, synthetic construct
  source 1..2808: mol_type = other DNA
gagatcgtgctgacacagagccctggcacactgtcactgtctccaggcgaaacagccacactgagctgtagagccagccagagcttcagcagcgacctggcttggtatcagcagaagcctggacaggcccctcggctgttgatctatggcgcctcttctagagccacaggcatccccgatagattcagcggctctggcagcggcaccgatttcaccctgacaatcagcagactggaacccgccgacttcgccgtgtactactgtcagcagtacggcagcagccctcctgtgacatttggcggcggaacaaaggtggaaatcaaacgtacggtggccgctcccagcgtgttcatcttcccacctagcgacgagcagctgaagtccggcacagcctctgtcgtgtgcctgctgaacaacttctacccccgcgaggccaaagtgcagtggaaggtggacaacgccctgcagagcggcaacagccaggaaagcgtgaccgagcaggacagcaaggactccacctacagcctgagcagcaccctgacactgagcaaggccgactacgagaagcacaaggtgtacgcctgcgaagtgacccaccagggcctgtctagccccgtgaccaagagcttcaaccggggcgagtgtggcggcggaggatctggcggaggtggaagcggaggcggtggaagcgacgtgcagatgacacagagcccttctagcctgtctgccagcgtgggcgacagagtgaccatcacatgtagagccagccagaccatcgtgggctacctgaactggtatcagcagcagcctggcagagcccctaagctgctgatctacgccgccagcaatctgcagtctggcgtgccacctagattttccggctctggcagcggcaccgatttcaccctgacaatcagcgacctgcagcctgaggacttcgccacctactactgccagcagagctacctgacacctcctaacacctttggccagggcaccaagctggaaatcaagggaggtggtggctctggcggatctgggagtggtggcggaggctctgcttctggatctggacaggttcagctggttcagtctggcgccgaagtgaagaaacctggcagcagcgtgaaggtgtcctgcaaagtgtctggcggcaccttcagcgatagcgccgtgtcttgggttcgacaggctcctggacaaggcctggaatggatgggcagaatcatccccatcttcagcaccatcgagtacgcccagaacttccagggcagagtgaccatcacagccgacgagagcaccaccaccgtgtacatggaactgagctacctgggcctcgaggacaccgccgtgtactactgtgccagagacagacctatcgccgtcgagtacaccggcaattggttcgatccttggggccagggcacactggtcacagtctcttctggaggcagctccggggaagtgcagctggtggaatcaggcggcggactgattcaacctggcggctctctgagactgtcttgtgctgcttctggcgtgatcgtgtcctacaactacatgaactgggtccgacaggctcccggcaaaggccttgaatgggtgtccgtgatctacagcggcggcagcaccttttacgccgattctgtgcggggcagattcaccatcagccgggacaacagcaagaacaccctgtacctgcagatgaacagcctgagagccgaggacaccgctgtgtactattgcgccagagatctgggacctgccggcgcttttgatatctggggcctgggcacaatggtcaccgtgtctagcgcttcgaccaagggcccatccgtgtttcctctggctcccagcagcaagtctacaagcggaggaacagccgctctgggctgcctggtcaaggattactttcccgagcctgtgaccgtgtcctggaattctggcgctctgacaagcggcgtgcacacctttccagctgtgctgcaaagcagcggcctgtactctctgagcagcgtggtcacagtgcctagctctagcctgggcacccagacctacatctgcaatgtgaaccacaagcctagcaacaccaaggtggacaagaaggtggaacccaagagctgcgataagacccacacatgtcctccatgtcctgctccagaactgctcggcggcccttctgtgttcctgtttcctccaaagcctaaggacaccctgatgatcagcagaacccctgaagtgacctgcgtggtggtggatgtgtctcacgaggaccccgaagtgaagttcaattggtacgtggacggcgtggaagtgcacaacgccaagaccaagcctagagaggaacagtacaacagcacctacagagtggtgtccgtgctgaccgtgctgcaccaggattggctgaacggcaaagagtacaagtgcaaggtgtccaacaaggccctgcctgctcctatcgagaaaaccatcagcaaggccaagggccagcctagggaaccccaggtttacacccttcctccatgccgggatgagctgaccaagaaccaggtgtccctgtggtgtctcgtgaagggcttctaccccagcgacattgccgtggaatgggagagcaatggccagcctgagaacaactacaagacaacccctcctgtgctggacagcgacggctcattcttcctgtacagcaagctgacagtcgacaagtccagatggcagcagggcaacgtgttcagttgcagcgtgctgcacgaggccctgcacgctcactacacccagaagtccctgagcctgtctcctggatagtga

SEQ ID NO: 948 - DNA, 2868 bp, synthetic construct; identical to SEQ ID NO: 928
  source 1..2868: mol_type = other DNA

SEQ ID NO: 949 - DNA, 2808 bp, synthetic construct; identical to SEQ ID NO: 947
  source 1..2808: mol_type = other DNA

SEQ ID NO: 950 - DNA, 2868 bp, synthetic construct; identical to SEQ ID NO: 930
  source 1..2868: mol_type = other DNA

SEQ ID NO: 951 - DNA, 2832 bp, synthetic construct
  source 1..2832: mol_type = other DNA
gagatcgtgctgacacagagccctggcacactgtcactgtctccaggcgaaacagccacactgagctgtagagccagccagagcttcagcagcgacctggcttggtatcagcagaagcctggacaggcccctcggctgttgatctatggcgcctcttctagagccacaggcatccccgatagattcagcggctctggcagcggcaccgatttcaccctgacaatcagcagactggaacccgccgacttcgccgtgtactactgtcagcagtacggcagcagccctcctgtgacatttggcggcggaacaaaggtggaaatcaaacgtacggtggccgctcccagcgtgttcatcttcccacctagcgacgagcagctgaagtccggcacagcctctgtcgtgtgcctgctgaacaacttctacccccgcgaggccaaagtgcagtggaaggtggacaacgccctgcagagcggcaacagccaggaaagcgtgaccgagcaggacagcaaggactccacctacagcctgagcagcaccctgacactgagcaaggccgactacgagaagcacaaggtgtacgcctgcgaagtgacccaccagggcctgtctagccccgtgaccaagagcttcaaccggggcgagtgtggcggcggaggatctggcggaggtggaagcggaggcggtggaagcagctacgtgctgacacagcctccatccgtgtctgtggctccaggacagaccgccagaatcacatgcggcggcaacaacatcggcaccaagagcgtgcactggtatcagcagaagcctggacaggcccctgtgctcgtgatcagcagcgatagcgatagacctagcggcgtgcccgatagattcagcggcagcaatagcggcaacaccgccacactgaccatcagcagagttgaggctggcgacgaggccgactactactgtcacgtgtgggatagcagcagcgaccactgggttttcggcggaggcacaaagctgacagtgctgggaggtggtggctctggcggatctgggagtggtggcggaggctctgcttctggatctggagaggtgcagctggttgaatctggcggcggaagagtgaagcctggcggatctctgagactgagctgtgccgccagcggcttcaccttcagcagctacagaatgaactgggtccgacaggcccctggcaaaggccttgaatgggtgtccagcatcagcagcggcagctcctacatctacttcgccgacagcgtgaagggcagattcaccatctccagagacaacgccaagaacagcctgttcctgcggatgaacaacctgagagtggaagataccgccgtgtactactgcgccagagcacccacactgagacacagcagcggatggtacgatcctcctggcaccgagaacagcagcttcgatctgtggggcagaggcaccctggtcacagtctcttctggaggcagctccggggaagtgcagctggtggaatcaggcggcggactgattcaacctggcggctctctgagactgtcttgtgctgcttctggcgtgatcgtgtcctacaactacatgaactgggtccgacaggctcccggcaaaggccttgaatgggtgtccgtgatctacagcggcggcagcaccttttacgccgattctgtgcggggcagattcaccatcagccgggacaacagcaagaacaccctgtacctgcagatgaacagcctgagagccgaggacaccgctgtgtactattgcgccagagatctgggacctgccggcgcttttgatatctggggcctgggcacaatggtcaccgtgtctagcgcttcgaccaagggcccatccgtgtttcctctggctcccagcagcaagtctacaagcggaggaacagccgctctgggctgcctggtcaaggattactttcccgagcctgtgaccgtgtcctggaattctggcgctctgacaagcggcgtgcacacctttccagctgtgctgcaaagcagcggcctgtactctctgagcagcgtggtcacagtgcctagctctagcctgggcacccagacctacatctgcaatgtgaaccacaagcctagcaacaccaaggtggacaagagagtggaacccaagagctgcgataagacccacacatgtcctccatgtcctgctccagaattcgaaggcggcccttctgtgttcctgtttcctccaaagcctaaggacaccctgtacatcaccagagaacctgaagtgacctgcgtggtggtggatgtgtctcacgaggaccccgaagtgaagttcaattggtacgtggacggcgtggaagtgcacaacgccaagaccaagcctagagaggaacagtacaacagcacctacagagtggtgtccgtgctgaccgtgctgcaccaggattggctgaacggcaaagagtacaagtgcaaggtgtccaacaaggccctgcctgcttccatcgagaaaaccatcagcaaggccaagggccagcctagggaaccccaggtttacacccttcctccatgtcgggaagagatgaccaagaaccaggtgtccctgtggtgtctggtgaagggcttctaccccagcgacattgccgtggaatgggagagcaatggccagcctgagaacaactacaagacaacccctcctgtgctggacagcgacggctcattcttcctgtacagcaagctgacagtcgacaagtccagatggcagcagggcaacgtgttcagttgcagcgtgatgcacgaggccctgcacaaccactacacccagaagtccctgagcctgtctcctggaaagtag

SEQ ID NO: 952 - DNA, 2844 bp, synthetic construct
  source 1..2844: mol_type = other DNA
gacgtgcagatgacacagagcccttctagcctgtctgccagcgtgggcgacagagtgaccatcacatgtagagccagccagaccatcgtgggctacctgaactggtatcagcagcagcctggcagagcccctaagctgctgatctacgccgccagcaatctgcagtctggcgtgccacctagattttccggctctggcagcggcaccgatttcaccctgacaatcagcgacctgcagcctgaggacttcgccacctactactgccagcagagctacctgacacctcctaacacctttggccagggcaccaagctggaaatcaagcgtacggtggccgctcccagcgtgttcatcttcccacctagcgacgagcagctgaagtccggcacagcctctgtcgtgtgcctgctgaacaacttctacccccgcgaggccaaagtgcagtggaaggtggacaacgccctgcagagcggcaacagccaggaaagcgtgaccgagcaggacagcaaggactccacctacagcctgagcagcaccctgacactgagcaaggccgactacgagaagcacaaggtgtacgcctgcgaagtgacccaccagggcctgtctagccccgtgaccaagagcttcaaccggggcgagtgtggcggcggaggatctggcggaggtggaagcggaggcggtggaagcgacaccgtgatgacacagagccctctgagcctgcctgtgacacctggcgaacctgccagcatcagctgtagaagcagccagagcctgctgaacagcaacggctacaactacctggattggtacgtgcagaagcccggccagtctcctcagctgctgatctacctgggcagcaatagagccagcggcgtgcccgatagattttctggctctggcagcggcaccgacttcaccctgaagatctctagagtggaagccgaggacgtgggcgtgtactactgtatgcagcctctgcagacccctctgttcacatttggccctggcaccaaggtggaaatcaaaggaggtggtggctctggcggatctgggagtggtggcggaggctctgcttctggatctggacaagtgacactgagagagtctggccccgctctggtcaagcctacacagaccctgacactgacctgcaccttcagcggcttcagcctgtctactagaggcgtgtgcgtgtcctggatcagacagcctcctggaaaggccctggaatggctggccttcatcgactgggacgacgacaagtactaccagaccagcctgaaaacccggctgaccatcagcaaggacaccagcaagaaccaggtggtgctgaccatgaccaacgtgcaccctgtggataccgccacctactactgcgccagaatcagctctcaccacggctccagctggtgtaccaccttcgattattggggccagggcgctctcgtgacagtttctgctggaggcagctccgggcaggttcagctggttcagtctggcgccgaagtgaagaaacctggcagcagcgtgaaggtgtcctgcaaagtgtctggcggcaccttcagcgatagcgccgtgtcttgggttcgacaggctcctggacaaggcctggaatggatgggcagaatcatccccatcttcagcaccatcgagtacgcccagaacttccagggcagagtgaccatcacagccgacgagagcaccaccaccgtgtacatggaactgagctacctgggcctcgaggacaccgccgtgtactactgtgccagagacagacctatcgccgtcgagtacaccggcaattggttcgatccttggggccagggcacactggtcacagtctcttctgcttcgaccaagggcccatccgtgtttcctctggctcccagcagcaagtctacaagcggaggaacagccgctctgggctgcctggtcaaggattactttcccgagcctgtgaccgtgtcctggaattctggcgctctgacaagcggcgtgcacacctttccagctgtgctgcaaagcagcggcctgtactctctgagcagcgtggtcacagtgcctagctctagcctgggcacccagacctacatctgcaatgtgaaccacaagcctagcaacaccaaggtggacaagagagtggaacccaagagctgcgataagacccacacatgtcctccatgtcctgctccagaattcgaaggcggcccttctgtgttcctgtttcctccaaagcctaaggacaccctgtacatcaccagagaacctgaagtgacctgcgtggtggtggatgtgtctcacgaggaccccgaagtgaagttcaattggtacgtggacggcgtggaagtgcacaacgccaagaccaagcctagagaggaacagtacaacagcacctacagagtggtgtccgtgctgaccgtgctgcaccaggattggctgaacggcaaagagtacaagtgcaaggtgtccaacaaggccctgcctgcttccatcgagaaaaccatcagcaaggccaagggccagcctagggaaccccaggtttgtacccttcctccaagccgggaagagatgaccaagaaccaggtgtccctgagctgtgccgtgaagggcttctaccccagcgacattgccgtggaatgggagagcaatggccagcctgagaacaactacaagacaacccctcctgtgctggacagcgacggctcattcttcctggtgagcaagctgacagtcgacaagtccagatggcagcagggcaacgtgttcagttgcagcgtgatgcacgaggccctgcacaaccactacacccagaagtccctgagcctgtctcctggaaagtag

SEQ ID NO: 953 - DNA, 2826 bp, synthetic construct
  source 1..2826: mol_type = other DNA
gagatcgtgctgacacagagccctggcacactgtcactgtctccaggcgaaacagccacactgagctgtagagccagccagagcttcagcagcgacctggcttggtatcagcagaagcctggacaggcccctcggctgttgatctatggcgcctcttctagagccacaggcatccccgatagattcagcggctctggcagcggcaccgatttcaccctgacaatcagcagactggaacccgccgacttcgccgtgtactactgtcagcagtacggcagcagccctcctgtgacatttggcggcggaacaaaggtggaaatcaaacgtacggtggccgctcccagcgtgttcatcttcccacctagcgacgagcagctgaagtccggcacagcctctgtcgtgtgcctgctgaacaacttctacccccgcgaggccaaagtgcagtggaaggtggacaacgccctgcagagcggcaacagccaggaaagcgtgaccgagcaggacagcaaggactccacctacagcctgagcagcaccctgacactgagcaaggccgactacgagaagcacaaggtgtacgcctgcgaagtgacccaccagggcctgtctagccccgtgaccaagagcttcaaccggggcgagtgtggcggcggaggatctggcggaggtggaagcggaggcggtggaagcgacaccgtgatgacacagagccctctgagcctgcctgtgacacctggcgaacctgccagcatcagctgtagaagcagccagagcctgctgaacagcaacggctacaactacctggattggtacgtgcagaagcccggccagtctcctcagctgctgatctacctgggcagcaatagagccagcggcgtgcccgatagattttctggctctggcagcggcaccgacttcaccctgaagatctctagagtggaagccgaggacgtgggcgtgtactactgtatgcagcctctgcagacccctctgttcacatttggccctggcaccaaggtggaaatcaaaggaggtggtggctctggcggatctgggagtggtggcggaggctctgcttctggatctggacaagtgacactgagagagtctggccccgctctggtcaagcctacacagaccctgacactgacctgcaccttcagcggcttcagcctgtctactagaggcgtgtgcgtgtcctggatcagacagcctcctggaaaggccctggaatggctggccttcatcgactgggacgacgacaagtactaccagaccagcctgaaaacccggctgaccatcagcaaggacaccagcaagaaccaggtggtgctgaccatgaccaacgtgcaccctgtggataccgccacctactactgcgccagaatcagctctcaccacggctccagctggtgtaccaccttcgattattggggccagggcgctctcgtgacagtttctgctggaggcagctccggggaagtgcagctggtggaatcaggcggcggactgattcaacctggcggctctctgagactgtcttgtgctgcttctggcgtgatcgtgtcctacaactacatgaactgggtccgacaggctcccggcaaaggccttgaatgggtgtccgtgatctacagcggcggcagcaccttttacgccgattctgtgcggggcagattcaccatcagccgggacaacagcaagaacaccctgtacctgcagatgaacagcctgagagccgaggacaccgctgtgtactattgcgccagagatctgggacctgccggcgcttttgatatctggggcctgggcacaatggtcaccgtgtctagcgcttcgaccaagggcccatccgtgtttcctctggctcccagcagcaagtctacaagcggaggaacagccgctctgggctgcctggtcaaggattactttcccgagcctgtgaccgtgtcctggaattctggcgctctgacaagcggcgtgcacacctttccagctgtgctgcaaagcagcggcctgtactctctgagcagcgtggtcacagtgcctagctctagcctgggcacccagacctacatctgcaatgtgaaccacaagcctagcaacaccaaggtggacaagagagtggaacccaagagctgcgataagacccacacatgtcctccatgtcctgctccagaattcgaaggcggcccttctgtgttcctgtttcctccaaagcctaaggacaccctgtacatcaccagagaacctgaagtgacctgcgtggtggtggatgtgtctcacgaggaccccgaagtgaagttcaattggtacgtggacggcgtggaagtgcacaacgccaagaccaagcctagagaggaacagtacaacagcacctacagagtggtgtccgtgctgaccgtgctgcaccaggattggctgaacggcaaagagtacaagtgcaaggtgtccaacaaggccctgcctgcttccatcgagaaaaccatcagcaaggccaagggccagcctagggaaccccaggtttacacccttcctccatgtcgggaagagatgaccaagaaccaggtgtccctgtggtgtctggtgaagggcttctaccccagcgacattgccgtggaatgggagagcaatggccagcctgagaacaactacaagacaacccctcctgtgctggacagcgacggctcattcttcctgtacagcaagctgacagtcgacaagtccagatggcagcagggcaacgtgttcagttgcagcgtgatgcacgaggccctgcacaaccactacacccagaagtccctgagcctgtctcctggaaagtag

SEQ ID NO: 954 - DNA, 2850 bp, synthetic construct
  source 1..2850: mol_type = other DNA
agctacgtgctgacacagcctccatccgtgtctgtggctccaggacagaccgccagaatcacatgcggcggcaacaacatcggcaccaagagcgtgcactggtatcagcagaagcctggacaggcccctgtgctcgtgatcagcagcgatagcgatagacctagcggcgtgcccgatagattcagcggcagcaatagcggcaacaccgccacactgaccatcagcagagttgaggctggcgacgaggccgactactactgtcacgtgtgggatagcagcagcgaccactgggttttcggcggaggcacaaagctgacagtgctgcgtacggtggccgctcccagcgtgttcatcttcccacctagcgacgagcagctgaagtccggcacagcctctgtcgtgtgcctgctgaacaacttctacccccgcgaggccaaagtgcagtggaaggtggacaacgccctgcagagcggcaacagccaggaaagcgtgaccgagcaggacagcaaggactccacctacagcctgagcagcaccctgacactgagcaaggccgactacgagaagcacaaggtgtacgcctgcgaagtgacccaccagggcctgtctagccccgtgaccaagagcttcaaccggggcgagtgtggcggcggaggatctggcggaggtggaagcggaggcggtggaagcgacgtgcagatgacacagagcccttctagcctgtctgccagcgtgggcgacagagtgaccatcacatgtagagccagccagaccatcgtgggctacctgaactggtatcagcagcagcctggcagagcccctaagctgctgatctacgccgccagcaatctgcagtctggcgtgccacctagattttccggctctggcagcggcaccgatttcaccctgacaatcagcgacctgcagcctgaggacttcgccacctactactgccagcagagctacctgacacctcctaacacctttggccagggcaccaagctggaaatcaagggaggtggtggctctggcggatctgggagtggtggcggaggctctgcttctggatctggacaggttcagctggttcagtctggcgccgaagtgaagaaacctggcagcagcgtgaaggtgtcctgcaaagtgtctggcggcaccttcagcgatagcgccgtgtcttgggttcgacaggctcctggacaaggcctggaatggatgggcagaatcatccccatcttcagcaccatcgagtacgcccagaacttccagggcagagtgaccatcacagccgacgagagcaccaccaccgtgtacatggaactgagctacctgggcctcgaggacaccgccgtgtactactgtgccagagacagacctatcgccgtcgagtacaccggcaattggttcgatccttggggccagggcacactggtcacagtctcttctggaggcagctccggggaggtgcagctggttgaatctggcggcggaagagtgaagcctggcggatctctgagactgagctgtgccgccagcggcttcaccttcagcagctacagaatgaactgggtccgacaggcccctggcaaaggccttgaatgggtgtccagcatcagcagcggcagctcctacatctacttcgccgacagcgtgaagggcagattcaccatctccagagacaacgccaagaacagcctgttcctgcggatgaacaacctgagagtggaagataccgccgtgtactactgcgccagagcacccacactgagacacagcagcggatggtacgatcctcctggcaccgagaacagcagcttcgatctgtggggcagaggcaccctggtcacagtctcttctgcttcgaccaagggcccatccgtgtttcctctggctcccagcagcaagtctacaagcggaggaacagccgctctgggctgcctggtcaaggattactttcccgagcctgtgaccgtgtcctggaattctggcgctctgacaagcggcgtgcacacctttccagctgtgctgcaaagcagcggcctgtactctctgagcagcgtggtcacagtgcctagctctagcctgggcacccagacctacatctgcaatgtgaaccacaagcctagcaacaccaaggtggacaagagagtggaacccaagagctgcgataagacccacacatgtcctccatgtcctgctccagaattcgaaggcggcccttctgtgttcctgtttcctccaaagcctaaggacaccctgtacatcaccagagaacctgaagtgacctgcgtggtggtggatgtgtctcacgaggaccccgaagtgaagttcaattggtacgtggacggcgtggaagtgcacaacgccaagaccaagcctagagaggaacagtacaacagcacctacagagtggtgtccgtgctgaccgtgctgcaccaggattggctgaacggcaaagagtacaagtgcaaggtgtccaacaaggccctgcctgcttccatcgagaaaaccatcagcaaggccaagggccagcctagggaaccccaggtttgtacccttcctccaagccgggaagagatgaccaagaaccaggtgtccctgagctgtgccgtgaagggcttctaccccagcgacattgccgtggaatgggagagcaatggccagcctgagaacaactacaagacaacccctcctgtgctggacagcgacggctcattcttcctggtgagcaagctgacagtcgacaagtccagatggcagcagggcaacgtgttcagttgcagcgtgatgcacgaggccctgcacaaccactacacccagaagtccctgagcctgtctcctggaaagtag

SEQ ID NO: 955 - DNA, 2832 bp, synthetic construct; identical to SEQ ID NO: 951
  source 1..2832: mol_type = other DNA

SEQ ID NO: 956 - DNA, 2814 bp, synthetic construct
  source 1..2814: mol_type = other DNA
gacgtgcagatgacacagagcccttctagcctgtctgccagcgtgggcgacagagtgaccatcacatgtagagccagccagaccatcgtgggctacctgaactggtatcagcagcagcctggcagagcccctaagctgctgatctacgccgccagcaatctgcagtctggcgtgccacctagattttccggctctggcagcggcaccgatttcaccctgacaatcagcgacctgcagcctgaggacttcgccacctactactgccagcagagctacctgacacctcctaacacctttggccagggcaccaagctggaaatcaagcgtacggtggccgctcccagcgtgttcatcttcccacctagcgacgagcagctgaagtccggcacagcctctgtcgtgtgcctgctgaacaacttctacccccgcgaggccaaagtgcagtggaaggtggacaacgccctgcagagcggcaacagccaggaaagcgtgaccgagcaggacagcaaggactccacctacagcctgagcagcaccctgacactgagcaaggccgactacgagaagcacaaggtgtacgcctgcgaagtgacccaccagggcctgtctagccccgtgaccaagagcttcaaccggggcgagtgtggcggcggaggatctggcggaggtggaagcggaggcggtggaagcgagatcgtgctgacacagtctcccgccacactgagtgtgtctccaggcgaaagagccacactgtcctgtagagccagccagagcgttagctctctgctggcctggtatcagagaaagcctggccagcctcctcggctgctgatctatggcgcttctacaagagccaccggcattcccgccagattttctggctctggcagcggcaccgagttcaccctgacaatctctagcctgcagagcgaggacttcgccgtgtactactgccagcagtacaacgactggtggacctttggccagggcaccaaggtggaaatcaagggaggtggtggctctggcggatctgggagtggtggcggaggctctgcttctggatctggacaggttcacctggttcagtctggcgccgaagtgaagaaacctggcgcctctgtgaaggtgtcctgcaaggccagcggctacacctttaccgactacttcatccactgggtccgacaggcccctggacaaggacttgaatggatgggctggatcaaccccgacgacggcgataccaattacgcccagaaattccacggctgggtcgccatgaccagagacacctctatcaacaccgcctacatggaactgagccggctgaagtccaacgacaccgccgtgtactattgcgccagaggcacctttagcctgcggggcttcgattggttcgatccttggggacagggcaccctggtcacagtctcttctggaggcagctccgggcaggttcagctggttcagtctggcgccgaagtgaagaaacctggcagcagcgtgaaggtgtcctgcaaagtgtctggcggcaccttcagcgatagcgccgtgtcttgggttcgacaggctcctggacaaggcctggaatggatgggcagaatcatccccatcttcagcaccatcgagtacgcccagaacttccagggcagagtgaccatcacagccgacgagagcaccaccaccgtgtacatggaactgagctacctgggcctcgaggacaccgccgtgtactactgtgccagagacagacctatcgccgtcgagtacaccggcaattggttcgatccttggggccagggcacactggtcacagtctcttctgcttcgaccaagggcccatccgtgtttcctctggctcccagcagcaagtctacaagcggaggaacagccgctctgggctgcctggtcaaggattactttcccgagcctgtgaccgtgtcctggaattctggcgctctgacaagcggcgtgcacacctttccagctgtgctgcaaagcagcggcctgtactctctgagcagcgtggtcacagtgcctagctctagcctgggcacccagacctacatctgcaatgtgaaccacaagcctagcaacaccaaggtggacaagagagtggaacccaagagctgcgataagacccacacatgtcctccatgtcctgctccagaattcgaaggcggcccttctgtgttcctgtttcctccaaagcctaaggacaccctgtacatcaccagagaacctgaagtgacctgcgtggtggtggatgtgtctcacgaggaccccgaagtgaagttcaattggtacgtggacggcgtggaagtgcacaacgccaagaccaagcctagagaggaacagtacaacagcacctacagagtggtgtccgtgctgaccgtgctgcaccaggattggctgaacggcaaagagtacaagtgcaaggtgtccaacaaggccctgcctgcttccatcgagaaaaccatcagcaaggccaagggccagcctagggaaccccaggtttgtacccttcctccaagccgggaagagatgaccaagaaccaggtgtccctgagctgtgccgtgaagggcttctaccccagcgacattgccgtggaatgggagagcaatggccagcctgagaacaactacaagacaacccctcctgtgctggacagcgacggctcattcttcctggtgagcaagctgacagtcgacaagtccagatggcagcagggcaacgtgttcagttgcagcgtgatgcacgaggccctgcacaaccactacacccagaagtccctgagcctgtctcctggaaagtag

SEQ ID NO: 957 - DNA, 2832 bp, synthetic construct; identical to SEQ ID NO: 951
  source 1..2832: mol_type = other DNA

SEQ ID NO: 958 - DNA, 2814 bp, synthetic construct
  source 1..2814: mol_type = other DNA
gacgtgcagatgacacagagcccttctagcctgtctgccagcgtgggcgacagagtgaccatcacatgtagagccagccagaccatcgtgggctacctgaactggtatcagcagcagcctggcagagcccctaagctgctgatctacgccgccagcaatctgcagtctggcgtgccacctagattttccggctctggcagcggcaccgatttcaccctgacaatcagcgacctgcagcctgaggacttcgccacctactactgccagcagagctacctgacacctcctaacacctttggccagggcaccaagctggaaatcaagcgtacggtggccgctcccagcgtgttcatcttcccacctagcgacgagcagctgaagtccggcacagcctctgtcgtgtgcctgctgaacaacttctacccccgcgaggccaaagtgcagtggaaggtggacaacgccctgcagagcggcaacagccaggaaagcgtgaccgagcaggacagcaaggactccacctacagcctgagcagcaccctgacactgagcaaggccgactacgagaagcacaaggtgtacgcctgcgaagtgacccaccagggcctgtctagccccgtgaccaagagcttcaaccggggcgagtgtggcggcggaggatctggcggaggtggaagcggaggcggtggaagcgagatcgtgctgacacagtctcccgccacactgagtgtgtctccaggcgaaagagccacactgtcctgtagagccagccagagcgttagctctctgctggcctggtatcagagaaagcctggccagcctcctcggctgctgatctatggcgcttctacaagagccaccggcattcccgccagattttctggctctggcagcggcaccgagttcaccctgacaatctctagcctgcagagcgaggacttcgccgtgtactactgccagcagtacaacgactggtggacctttggccagggcaccaaggtggaaatcaagggaggtggtggctctggcggatctgggagtggtggcggaggctctgcttctggatctggacaggttcacctggttcagtctggcgccgaagtgaagaaacctggcgcctctgtgaaggtgtcctgcaaggccagcggctacacctttaccgactacttcatccactgggtccgacaggcccctggacaaggacttgaatggatgggctggatcaaccccgacgacggcgataccaattacgcccagaaattccacggctgggtcgccatgaccagagacacctctatcaacaccgcctacatggaactgagccggctgaagtcccaggacaccgccgtgtactattgcgccagaggcacctttagcctgcggggcttcgattggttcgatccttggggacagggcaccctggtcacagtctcttctggaggcagctccgggcaggttcagctggttcagtctggcgccgaagtgaagaaacctggcagcagcgtgaaggtgtcctgcaaagtgtctggcggcaccttcagcgatagcgccgtgtcttgggttcgacaggctcctggacaaggcctggaatggatgggcagaatcatccccatcttcagcaccatcgagtacgcccagaacttccagggcagagtgaccatcacagccgacgagagcaccaccaccgtgtacatggaactgagctacctgggcctcgaggacaccgccgtgtactactgtgccagagacagacctatcgccgtcgagtacaccggcaattggttcgatccttggggccagggcacactggtcacagtctcttctgcttcgaccaagggcccatccgtgtttcctctggctcccagcagcaagtctacaagcggaggaacagccgctctgggctgcctggtcaaggattactttcccgagcctgtgaccgtgtcctggaattctggcgctctgacaagcggcgtgcacacctttccagctgtgctgcaaagcagcggcctgtactctctgagcagcgtggtcacagtgcctagctctagcctgggcacccagacctacatctgcaatgtgaaccacaagcctagcaacaccaaggtggacaagagagtggaacccaagagctgcgataagacccacacatgtcctccatgtcctgctccagaattcgaaggcggcccttctgtgttcctgtttcctccaaagcctaaggacaccctgtacatcaccagagaacctgaagtgacctgcgtggtggtggatgtgtctcacgaggaccccgaagtgaagttcaattggtacgtggacggcgtggaagtgcacaacgccaagaccaagcctagagaggaacagtacaacagcacctacagagtggtgtccgtgctgaccgtgctgcaccaggattggctgaacggcaaagagtacaagtgcaaggtgtccaacaaggccctgcctgcttccatcgagaaaaccatcagcaaggccaagggccagcctagggaaccccaggtttgtacccttcctccaagccgggaagagatgaccaagaaccaggtgtccctgagctgtgccgtgaagggcttctaccccagcgacattgccgtggaatgggagagcaatggccagcctgagaacaactacaagacaacccctcctgtgctggacagcgacggctcattcttcctggtgagcaagctgacagtcgacaagtccagatggcagcagggcaacgtgttcagttgcagcgtgatgcacgaggccctgcacaaccactacacccagaagtccctgagcctgtctcctggaaagtag

SEQ ID NO: 959 - DNA, 2796 bp, synthetic construct
  source 1..2796: mol_type = other DNA
gagatcgtgctgacacagagccctggcacactgtcactgtctccaggcgaaacagccacactgagctgtagagccagccagagcttcagcagcgacctggcttggtatcagcagaagcctggacaggcccctcggctgttgatctatggcgcctcttctagagccacaggcatccccgatagattcagcggctctggcagcggcaccgatttcaccctgacaatcagcagactggaacccgccgacttcgccgtgtactactgtcagcagtacggcagcagccctcctgtgacatttggcggcggaacaaaggtggaaatcaaacgtacggtggccgctcccagcgtgttcatcttcccacctagcgacgagcagctgaagtccggcacagcctctgtcgtgtgcctgctgaacaacttctacccccgcgaggccaaagtgcagtggaaggtggacaacgccctgcagagcggcaacagccaggaaagcgtgaccgagcaggacagcaaggactccacctacagcctgagcagcaccctgacactgagcaaggccgactacgagaagcacaaggtgtacgcctgcgaagtgacccaccagggcctgtctagccccgtgaccaagagcttcaaccggggcgagtgtggcggcggaggatctggcggaggtggaagcggaggcggtggaagcgagatcgtgctgacacagtctcccgccacactgagtgtgtctccaggcgaaagagccacactgtcctgtagagccagccagagcgttagctctctgctggcctggtatcagagaaagcctggccagcctcctcggctgctgatctatggcgcttctacaagagccaccggcattcccgccagattttctggctctggcagcggcaccgagttcaccctgacaatctctagcctgcagagcgaggacttcgccgtgtactactgccagcagtacaacgactggtggacctttggccagggcaccaaggtggaaatcaagggaggtggtggctctggcggatctgggagtggtggcggaggctctgcttctggatctggacaggttcacctggttcagtctggcgccgaagtgaagaaacctggcgcctctgtgaaggtgtcctgcaaggccagcggctacacctttaccgactacttcatccactgggtccgacaggcccctggacaaggacttgaatggatgggctggatcaaccccgacgacggcgataccaattacgcccagaaattccacggctgggtcgccatgaccagagacacctctatcaacaccgcctacatggaactgagccggctgaagtccaacgacaccgccgtgtactattgcgccagaggcacctttagcctgcggggcttcgattggttcgatccttggggacagggcaccctggtcacagtctcttctggaggcagctccggggaagtgcagctggtggaatcaggcggcggactgattcaacctggcggctctctgagactgtcttgtgctgcttctggcgtgatcgtgtcctacaactacatgaactgggtccgacaggctcccggcaaaggccttgaatgggtgtccgtgatctacagcggcggcagcaccttttacgccgattctgtgcggggcagattcaccatcagccgggacaacagcaagaacaccctgtacctgcagatgaacagcctgagagccgaggacaccgctgtgtactattgcgccagagatctgggacctgccggcgcttttgatatctggggcctgggcacaatggtcaccgtgtctagcgcttcgaccaagggcccatccgtgtttcctctggctcccagcagcaagtctacaagcggaggaacagccgctctgggctgcctggtcaaggattactttcccgagcctgtgaccgtgtcctggaattctggcgctctgacaagcggcgtgcacacctttccagctgtgctgcaaagcagcggcctgtactctctgagcagcgtggtcacagtgcctagctctagcctgggcacccagacctacatctgcaatgtgaaccacaagcctagcaacaccaaggtggacaagagagtggaacccaagagctgcgataagacccacacatgtcctccatgtcctgctccagaattcgaaggcggcccttctgtgttcctgtttcctccaaagcctaaggacaccctgtacatcaccagagaacctgaagtgacctgcgtggtggtggatgtgtctcacgaggaccccgaagtgaagttcaattggtacgtggacggcgtggaagtgcacaacgccaagaccaagcctagagaggaacagtacaacagcacctacagagtggtgtccgtgctgaccgtgctgcaccaggattggctgaacggcaaagagtacaagtgcaaggtgtccaacaaggccctgcctgcttccatcgagaaaaccatcagcaaggccaagggccagcctagggaaccccaggtttacacccttcctccatgtcgggaagagatgaccaagaaccaggtgtccctgtggtgtctggtgaagggcttctaccccagcgacattgccgtggaatgggagagcaatggccagcctgagaacaactacaagacaacccctcctgtgctggacagcgacggctcattcttcctgtacagcaagctgacagtcgacaagtccagatggcagcagggcaacgtgttcagttgcagcgtgatgcacgaggccctgcacaaccactacacccagaagtccctgagcctgtctcctggaaagtag

SEQ ID NO: 960 - DNA, 2850 bp, synthetic construct; identical to SEQ ID NO: 954
  source 1..2850: mol_type = other DNA

SEQ ID NO: 961 - DNA, 2796 bp, synthetic construct
  source 1..2796: mol_type = other DNA
gagatcgtgctgacacagagccctggcacactgtcactgtctccaggcgaaacagccacactgagctgtagagccagccagagcttcagcagcgacctggcttggtatcagcagaagcctggacaggcccctcggctgttgatctatggcgcctcttctagagccacaggcatccccgatagattcagcggctctggcagcggcaccgatttcaccctgacaatcagcagactggaacccgccgacttcgccgtgtactactgtcagcagtacggcagcagccctcctgtgacatttggcggcggaacaaaggtggaaatcaaacgtacggtggccgctcccagcgtgttcatcttcccacctagcgacgagcagctgaagtccggcacagcctctgtcgtgtgcctgctgaacaacttctacccccgcgaggccaaagtgcagtggaaggtggacaacgccctgcagagcggcaacagccaggaaagcgtgaccgagcaggacagcaaggactccacctacagcctgagcagcaccctgacactgagcaaggccgactacgagaagcacaaggtgtacgcctgcgaagtgacccaccagggcctgtctagccccgtgaccaagagcttcaaccggggcgagtgtggcggcggaggatctggcggaggtggaagcggaggcggtggaagcgagatcgtgctgacacagtctcccgccacactgagtgtgtctccaggcgaaagagccacactgtcctgtagagccagccagagcgttagctctctgctggcctggtatcagagaaagcctggccagcctcctcggctgctgatctatggcgcttctacaagagccaccggcattcccgccagattttctggctctggcagcggcaccgagttcaccctgacaatctctagcctgcagagcgaggacttcgccgtgtactactgccagcagtacaacgactggtggacctttggccagggcaccaaggtggaaatcaagggaggtggtggctctggcggatctgggagtggtggcggaggctctgcttctggatctggacaggttcacctggttcagtctggcgccgaagtgaagaaacctggcgcctctgtgaaggtgtcctgcaaggccagcggctacacctttaccgactacttcatccactgggtccgacaggcccctggacaaggacttgaatggatgggctggatcaaccccgacgacggcgataccaattacgcccagaaattccacggctgggtcgccatgaccagagacacctctatcaacaccgcctacatggaactgagccggctgaagtcccaggacaccgccgtgtactattgcgccagaggcacctttagcctgcggggcttcgattggttcgatccttggggacagggcaccctggtcacagtctcttctggaggcagctccggggaagtgcagctggtggaatcaggcggcggactgattcaacctggcggctctctgagactgtcttgtgctgcttctggcgtgatcgtgtcctacaactacatgaactgggtccgacaggctcccggcaaaggccttgaatgggtgtccgtgatctacagcggcggcagcaccttttacgccgattctgtgcggggcagattcaccatcagccgggacaacagcaagaacaccctgtacctgcagatgaacagcctgagagccgaggacaccgctgtgtactattgcgccagagatctgggacctgccggcgcttttgatatctggggcctgggcacaatggtcaccgtgtctagcgcttcgaccaagggcccatccgtgtttcctctggctcccagcagcaagtctacaagcggaggaacagccgctctgggctgcctggtcaaggattactttcccgagcctgtgaccgtgtcctggaattctggcgctctgacaagcggcgtgcacacctttccagctgtgctgcaaagcagcggcctgtactctctgagcagcgtggtcacagtgcctagctctagcctgggcacccagacctacatctgcaatgtgaaccacaagcctagcaacaccaaggtggacaagagagtggaacccaagagctgcgataagacccacacatgtcctccatgtcctgctccagaattcgaaggcggcccttctgtgttcctgtttcctccaaagcctaaggacaccctgtacatcaccagagaacctgaagtgacctgcgtggtggtggatgtgtctcacgaggaccccgaagtgaagttcaattggtacgtggacggcgtggaagtgcacaacgccaagaccaagcctagagaggaacagtacaacagcacctacagagtggtgtccgtgctgaccgtgctgcaccaggattggctgaacggcaaagagtacaagtgcaaggtgtccaacaaggccctgcctgcttccatcgagaaaaccatcagcaaggccaagggccagcctagggaaccccaggtttacacccttcctccatgtcgggaagagatgaccaagaaccaggtgtccctgtggtgtctggtgaagggcttctaccccagcgacattgccgtggaatgggagagcaatggccagcctgagaacaactacaagacaacccctcctgtgctggacagcgacggctcattcttcctgtacagcaagctgacagtcgacaagtccagatggcagcagggcaacgtgttcagttgcagcgtgatgcacgaggccctgcacaaccactacacccagaagtccctgagcctgtctcctggaaagtag

SEQ ID NO: 962 - DNA, 2850 bp, synthetic construct; identical to SEQ ID NO: 954
  source 1..2850: mol_type = other DNA

SEQ ID NO: 963 - DNA, 2808 bp, synthetic construct
  source 1..2808: mol_type = other DNA
gacgtgcagatgacacagagcccttctagcctgtctgccagcgtgggcgacagagtgaccatcacatgtagagccagccagaccatcgtgggctacctgaactggtatcagcagcagcctggcagagcccctaagctgctgatctacgccgccagcaatctgcagtctggcgtgccacctagattttccggctctggcagcggcaccgatttcaccctgacaatcagcgacctgcagcctgaggacttcgccacctactactgccagcagagctacctgacacctcctaacacctttggccagggcaccaagctggaaatcaagcgtacggtggccgctcccagcgtgttcatcttcccacctagcgacgagcagctgaagtccggcacagcctctgtcgtgtgcctgctgaacaacttctacccccgcgaggccaaagtgcagtggaaggtggacaacgccctgcagagcggcaacagccaggaaagcgtgaccgagcaggacagcaaggactccacctacagcctgagcagcaccctgacactgagcaaggccgactacgagaagcacaaggtgtacgcctgcgaagtgacccaccagggcctgtctagccccgtgaccaagagcttcaaccggggcgagtgtggcggcggaggatctggcggaggtggaagcggaggcggtggaagcgagatcgtgctgacacagagccctggcacactgtcactgtctccaggcgaaacagccacactgagctgtagagccagccagagcttcagcagcgacctggcttggtatcagcagaagcctggacaggcccctcggctgttgatctatggcgcctcttctagagccacaggcatccccgatagattcagcggctctggcagcggcaccgatttcaccctgacaatcagcagactggaacccgccgacttcgccgtgtactactgtcagcagtacggcagcagccctcctgtgacatttggcggcggaacaaaggtggaaatcaaaggaggtggtggctctggcggatctgggagtggtggcggaggctctgcttctggatctggagaagtgcagctggtggaatcaggcggcggactgattcaacctggcggctctctgagactgtcttgtgctgcttctggcgtgatcgtgtcctacaactacatgaactgggtccgacaggctcccggcaaaggccttgaatgggtgtccgtgatctacagcggcggcagcaccttttacgccgattctgtgcggggcagattcaccatcagccgggacaacagcaagaacaccctgtacctgcagatgaacagcctgagagccgaggacaccgctgtgtactattgcgccagagatctgggacctgccggcgcttttgatatctggggcctgggcacaatggtcaccgtgtctagcggaggcagctccgggcaggttcagctggttcagtctggcgccgaagtgaagaaacctggcagcagcgtgaaggtgtcctgcaaagtgtctggcggcaccttcagcgatagcgccgtgtcttgggttcgacaggctcctggacaaggcctggaatggatgggcagaatcatccccatcttcagcaccatcgagtacgcccagaacttccagggcagagtgaccatcacagccgacgagagcaccaccaccgtgtacatggaactgagctacctgggcctcgaggacaccgccgtgtactactgtgccagagacagacctatcgccgtcgagtacaccggcaattggttcgatccttggggccagggcacactggtcacagtctcttctgcttcgaccaagggcccatccgtgtttcctctggctcccagcagcaagtctacaagcggaggaacagccgctctgggctgcctggtcaaggattactttcccgagcctgtgaccgtgtcctggaattctggcgctctgacaagcggcgtgcacacctttccagctgtgctgcaaagcagcggcctgtactctctgagcagcgtggtcacagtgcctagctctagcctgggcacccagacctacatctgcaatgtgaaccacaagcctagcaacaccaaggtggacaagagagtggaacccaagagctgcgataagacccacacatgtcctccatgtcctgctccagaattcgaaggcggcccttctgtgttcctgtttcctccaaagcctaaggacaccctgtacatcaccagagaacctgaagtgacctgcgtggtggtggatgtgtctcacgaggaccccgaagtgaagttcaattggtacgtggacggcgtggaagtgcacaacgccaagaccaagcctagagaggaacagtacaacagcacctacagagtggtgtccgtgctgaccgtgctgcaccaggattggctgaacggcaaagagtacaagtgcaaggtgtccaacaaggccctgcctgcttccatcgagaaaaccatcagcaaggccaagggccagcctagggaaccccaggtttacacccttcctccatgtcgggaagagatgaccaagaaccaggtgtccctgtggtgtctggtgaagggcttctaccccagcgacattgccgtggaatgggagagcaatggccagcctgagaacaactacaagacaacccctcctgtgctggacagcgacggctcattcttcctgtacagcaagctgacagtcgacaagtccagatggcagcagggcaacgtgttcagttgcagcgtgatgcacgaggccctgcacaaccactacacccagaagtccctgagcctgtctcctggaaagtag

SEQ ID NO: 964 - DNA, 2838 bp, synthetic construct
  source 1..2838: mol_type = other DNA
gagatcgtgctgacacagtctcccgccacactgagtgtgtctccaggcgaaagagccacactgtcctgtagagccagccagagcgttagctctctgctggcctggtatcagagaaagcctggccagcctcctcggctgctgatctatggcgcttctacaagagccaccggcattcccgccagattttctggctctggcagcggcaccgagttcaccctgacaatctctagcctgcagagcgaggacttcgccgtgtactactgccagcagtacaacgactggtggacctttggccagggcaccaaggtggaaatcaagcgtacggtggccgctcccagcgtgttcatcttcccacctagcgacgagcagctgaagtccggcacagcctctgtcgtgtgcctgctgaacaacttctacccccgcgaggccaaagtgcagtggaaggtggacaacgccctgcagagcggcaacagccaggaaagcgtgaccgagcaggacagcaaggactccacctacagcctgagcagcaccctgacactgagcaaggccgactacgagaagcacaaggtgtacgcctgcgaagtgacccaccagggcctgtctagccccgtgaccaagagcttcaaccggggcgagtgtggcggcggaggatctggcggaggtggaagcggaggcggtggaagcagctacgtgctgacacagcctccatccgtgtctgtggctccaggacagaccgccagaatcacatgcggcggcaacaacatcggcaccaagagcgtgcactggtatcagcagaagcctggacaggcccctgtgctcgtgatcagcagcgatagcgatagacctagcggcgtgcccgatagattcagcggcagcaatagcggcaacaccgccacactgaccatcagcagagttgaggctggcgacgaggccgactactactgtcacgtgtgggatagcagcagcgaccactgggttttcggcggaggcacaaagctgacagtgctgggaggtggtggctctggcggatctgggagtggtggcggaggctctgcttctggatctggagaggtgcagctggttgaatctggcggcggaagagtgaagcctggcggatctctgagactgagctgtgccgccagcggcttcaccttcagcagctacagaatgaactgggtccgacaggcccctggcaaaggccttgaatgggtgtccagcatcagcagcggcagctcctacatctacttcgccgacagcgtgaagggcagattcaccatctccagagacaacgccaagaacagcctgttcctgcggatgaacaacctgagagtggaagataccgccgtgtactactgcgccagagcacccacactgagacacagcagcggatggtacgatcctcctggcaccgagaacagcagcttcgatctgtggggcagaggcaccctggtcacagtctcttctggaggcagctccgggcaggttcacctggttcagtctggcgccgaagtgaagaaacctggcgcctctgtgaaggtgtcctgcaaggccagcggctacacctttaccgactacttcatccactgggtccgacaggcccctggacaaggacttgaatggatgggctggatcaaccccgacgacggcgataccaattacgcccagaaattccacggctgggtcgccatgaccagagacacctctatcaacaccgcctacatggaactgagccggctgaagtccaacgacaccgccgtgtactattgcgccagaggcacctttagcctgcggggcttcgattggttcgatccttggggacagggcaccctggtcacagtctcttctgcttcgaccaagggcccatccgtgtttcctctggctcccagcagcaagtctacaagcggaggaacagccgctctgggctgcctggtcaaggattactttcccgagcctgtgaccgtgtcctggaattctggcgctctgacaagcggcgtgcacacctttccagctgtgctgcaaagcagcggcctgtactctctgagcagcgtggtcacagtgcctagctctagcctgggcacccagacctacatctgcaatgtgaaccacaagcctagcaacaccaaggtggacaagagagtggaacccaagagctgcgataagacccacacatgtcctccatgtcctgctccagaattcgaaggcggcccttctgtgttcctgtttcctccaaagcctaaggacaccctgtacatcaccagagaacctgaagtgacctgcgtggtggtggatgtgtctcacgaggaccccgaagtgaagttcaattggtacgtggacggcgtggaagtgcacaacgccaagaccaagcctagagaggaacagtacaacagcacctacagagtggtgtccgtgctgaccgtgctgcaccaggattggctgaacggcaaagagtacaagtgcaaggtgtccaacaaggccctgcctgcttccatcgagaaaaccatcagcaaggccaagggccagcctagggaaccccaggtttgtacccttcctccaagccgggaagagatgaccaagaaccaggtgtccctgagctgtgccgtgaagggcttctaccccagcgacattgccgtggaatgggagagcaatggccagcctgagaacaactacaagacaacccctcctgtgctggacagcgacggctcattcttcctggtgagcaagctgacagtcgacaagtccagatggcagcagggcaacgtgttcagttgcagcgtgatgcacgaggccctgcacaaccactacacccagaagtccctgagcctgtctcctggaaagtag

SEQ ID NO: 965 - DNA, 2808 bp, synthetic construct; identical to SEQ ID NO: 963
  source 1..2808: mol_type = other DNA

SEQ ID NO: 966 - DNA, 2838 bp, synthetic construct
  source 1..2838: mol_type = other DNA
gagatcgtgctgacacagtctcccgccacactgagtgtgtctccaggcgaaagagccacactgtcctgtagagccagccagagcgttagctctctgctggcctggtatcagagaaagcctggccagcctcctcggctgctgatctatggcgcttctacaagagccaccggcattcccgccagattttctggctctggcagcggcaccgagttcaccctgacaatctctagcctgcagagcgaggacttcgccgtgtactactgccagcagtacaacgactggtggacctttggccagggcaccaaggtggaaatcaagcgtacggtggccgctcccagcgtgttcatcttcccacctagcgacgagcagctgaagtccggcacagcctctgtcgtgtgcctgctgaacaacttctacccccgcgaggccaaagtgcagtggaaggtggacaacgccctgcagagcggcaacagccaggaaagcgtgaccgagcaggacagcaaggactccacctacagcctgagcagcaccctgacactgagcaaggccgactacgagaagcacaaggtgtacgcctgcgaagtgacccaccagggcctgtctagccccgtgaccaagagcttcaaccggggcgagtgtggcggcggaggatctggcggaggtggaagcggaggcggtggaagcagctacgtgctgacacagcctccatccgtgtctgtggctccaggacagaccgccagaatcacatgcggcggcaacaacatcggcaccaagagcgtgcactggtatcagcagaagcctggacaggcccctgtgctcgtgatcagcagcgatagcgatagacctagcggcgtgcccgatagattcagcggcagcaatagcggcaacaccgccacactgaccatcagcagagttgaggctggcgacgaggccgactactactgtcacgtgtgggatagcagcagcgaccactgggttttcggcggaggcacaaagctgacagtgctgggaggtggtggctctggcggatctgggagtggtggcggaggctctgcttctggatctggagaggtgcagctggttgaatctggcggcggaagagtgaagcctggcggatctctgagactgagctgtgccgccagcggcttcaccttcagcagctacagaatgaactgggtccgacaggcccctggcaaaggccttgaatgggtgtccagcatcagcagcggcagctcctacatctacttcgccgacagcgtgaagggcagattcaccatctccagagacaacgccaagaacagcctgttcctgcggatgaacaacctgagagtggaagataccgccgtgtactactgcgccagagcacccacactgagacacagcagcggatggtacgatcctcctggcaccgagaacagcagcttcgatctgtggggcagaggcaccctggtcacagtctcttctggaggcagctccgggcaggttcacctggttcagtctggcgccgaagtgaagaaacctggcgcctctgtgaaggtgtcctgcaaggccagcggctacacctttaccgactacttcatccactgggtccgacaggcccctggacaaggacttgaatggatgggctggatcaaccccgacgacggcgataccaattacgcccagaaattccacggctgggtcgccatgaccagagacacctctatcaacaccgcctacatggaactgagccggctgaagtcccaggacaccgccgtgtactattgcgccagaggcacctttagcctgcggggcttcgattggttcgatccttggggacagggcaccctggtcacagtctcttctgcttcgaccaagggcccatccgtgtttcctctggctcccagcagcaagtctacaagcggaggaacagccgctctgggctgcctggtcaaggattactttcccgagcctgtgaccgtgtcctggaattctggcgctctgacaagcggcgtgcacacctttccagctgtgctgcaaagcagcggcctgtactctctgagcagcgtggtcacagtgcctagctctagcctgggcacccagacctacatctgcaatgtgaaccacaagcctagcaacaccaaggtggacaagagagtggaacccaagagctgcgataagacccacacatgtcctccatgtcctgctccagaattcgaaggcggcccttctgtgttcctgtttcctccaaagcctaaggacaccctgtacatcaccagagaacctgaagtgacctgcgtggtggtggatgtgtctcacgaggaccccgaagtgaagttcaattggtacgtggacggcgtggaagtgcacaacgccaagaccaagcctagagaggaacagtacaacagcacctacagagtggtgtccgtgctgaccgtgctgcaccaggattggctgaacggcaaagagtacaagtgcaaggtgtccaacaaggccctgcctgcttccatcgagaaaaccatcagcaaggccaagggccagcctagggaaccccaggtttgtacccttcctccaagccgggaagagatgaccaagaaccaggtgtccctgagctgtgccgtgaagggcttctaccccagcgacattgccgtggaatgggagagcaatggccagcctgagaacaactacaagacaacccctcctgtgctggacagcgacggctcattcttcctggtgagcaagctgacagtcgacaagtccagatggcagcagggcaacgtgttcagttgcagcgtgatgcacgaggccctgcacaaccactacacccagaagtccctgagcctgtctcctggaaagtag

SEQ ID NO: 967 - protein, 25 aa, synthetic construct
GGSGSGGGGSGGSGSGGGGSASGSG

SEQ ID NO: 968 - protein, 10 aa, synthetic construct
GGGGSASGSG

SEQ ID NO: 969 - protein, 10 aa, synthetic construct
ASGSGGGSSG

SEQ ID NO: 970 - protein, 15 aa, synthetic construct
GGGGSASGSGGGSSG

SEQ ID NO: 971 - protein, 20 aa, synthetic construct
GGSGSGGGGSASGSGGGSSG

SEQ ID NO: 972 - protein, 945 aa, synthetic construct
EIVLTQSPGTLSLSPGETATLSCRASQSFSSDLAWYQQKPGQAPRLLIYGASSRATGIPDRFSGSGSGTDFTLTISRLEPADFAVYYCQQYGSSPPVTFGGGTKVEIKRTVAAPSVFIFPPSDEQLKSGTASVVCLLNNFYPREAKVQWKVDNALQSGNSQESVTEQDSKDSTYSLSSTLTLSKADYEKHKVYACEVTHQGLSSPVTKSFNRGECGGGGSGGGGSGGGGSDTVMTQSPLSLPVTPGEPASISCRSSQSLLNSNGYNYLDWYVQKPGQSPQLLIYLGSNRASGVPDRFSGSGSGTDFTLKISRVEAEDVGVYYCMQPLQTPLFTFGPGTKVEIKGGSGSGGGGSGGSGSGGGGSASGSGQVTLRESGPALVKPTQTLTLTCTFSGFSLSTRGVCVSWIRQPPGKALEWLAFIDWDDDKYYQTSLKTRLTISKDTSKNQVVLTMTNVHPVDTATYYCARISSHHGSSWCTTFDYWGQGALVTVSAGGSSGEVQLVESGGGLIQPGGSLRLSCAASGVIVSYNYMNWVRQAPGKGLEWVSVIYSGGSTFYADSVRGRFTISRDNSKNTLYLQMNSLRAEDTAVYYCARDLGPAGAFDIWGLGTMVTVSSASTKGPSVFPLAPSSKSTSGGTAALGCLVKDYFPEPVTVSWNSGALTSGVHTFPAVLQSSGLYSLSSVVTVPSSSLGTQTYICNVNHKPSNTKVDKKVEPKSCDKTHTCPPCPAPELLGGPSVFLFPPKPKDTLMISRTPEVTCVVVDVSHEDPEVKFNWYVDGVEVHNAKTKPREEQYNSTYRVVSVLTVLHQDWLNGKEYKCKVSNKALPAPIEKTISKAKGQPREPQVYTLPPSRDELTKNQVSLTCLVKGFYPSDIAVEWESNGQPENNYKTTPPVLDSDGSFFLYSKLTVDKSRWQQGNVFSCSVLHEALHAHYTQKSLSLSPG

SEQ ID NO: 973 - protein, 935 aa, synthetic construct
EIVLTQSPGTLSLSPGETATLSCRASQSFSSDLAWYQQKPGQAPRLLIYGASSRATGIPDRFSGSGSGTDFTLTISRLEPADFAVYYCQQYGSSPPVTFGGGTKVEIKRTVAAPSVFIFPPSDEQLKSGTASVVCLLNNFYPREAKVQWKVDNALQSGNSQESVTEQDSKDSTYSLSSTLTLSKADYEKHKVYACEVTHQGLSSPVTKSFNRGECGGGGSGGGGSGGGGSDTVMTQSPLSLPVTPGEPASISCRSSQSLLNSNGYNYLDWYVQKPGQSPQLLIYLGSNRASGVPDRFSGSGSGTDFTLKISRVEAEDVGVYYCMQPLQTPLFTFGPGTKVEIKGGSGSGGGGSASGSGQVTLRESGPALVKPTQTLTLTCTFSGFSLSTRGVCVSWIRQPPGKALEWLAFIDWDDDKYYQTSLKTRLTISKDTSKNQVVLTMTNVHPVDTATYYCARISSHHGSSWCTTFDYWGQGALVTVSAGGSSGEVQLVESGGGLIQPGGSLRLSCAASGVIVSYNYMNWVRQAPGKGLEWVSVIYSGGSTFYADSVRGRFTISRDNSKNTLYLQMNSLRAEDTAVYYCARDLGPAGAFDIWGLGTMVTVSSASTKGPSVFPLAPSSKSTSGGTAALGCLVKDYFPEPVTVSWNSGALTSGVHTFPAVLQSSGLYSLSSVVTVPSSSLGTQTYICNVNHKPSNTKVDKKVEPKSCDKTHTCPPCPAPELLGGPSVFLFPPKPKDTLMISRTPEVTCVVVDVSHEDPEVKFNWYVDGVEVHNAKTKPREEQYNSTYRVVSVLTVLHQDWLNGKEYKCKVSNKALPAPIEKTISKAKGQPREPQVYTLPPSRDELTKNQVSLTCLVKGFYPSDIAVEWESNGQPENNYKTTPPVLDSDGSFFLYSKLTVDKSRWQQGNVFSCSVLHEALHAHYTQKSLSLSPG

SEQ ID NO: 974 - protein, 930 aa, synthetic construct
EIVLTQSPGTLSLSPGETATLSCRASQSFSSDLAWYQQKPGQAPRLLIYGASSRATGIPDRFSGSGSGTDFTLTISRLEPADFAVYYCQQYGSSPPVTFGGGTKVEIKRTVAAPSVFIFPPSDEQLKSGTASVVCLLNNFYPREAKVQWKVDNALQSGNSQESVTEQDSKDSTYSLSSTLTLSKADYEKHKVYACEVTHQGLSSPVTKSFNRGECGGGGSGGGGSGGGGSDTVMTQSPLSLPVTPGEPASISCRSSQSLLNSNGYNYLDWYVQKPGQSPQLLIYLGSNRASGVPDRFSGSGSGTDFTLKISRVEAEDVGVYYCMQPLQTPLFTFGPGTKVEIKGGGGSASGSGQVTLRESGPALVKPTQTLTLTCTFSGFSLSTRGVCVSWIRQPPGKALEWLAFIDWDDDKYYQTSLKTRLTISKDTSKNQVVLTMTNVHPVDTATYYCARISSHHGSSWCTTFDYWGQGALVTVSAGGSSGEVQLVESGGGLIQPGGSLRLSCAASGVIVSYNYMNWVRQAPGKGLEWVSVIYSGGSTFYADSVRGRFTISRDNSKNTLYLQMNSLRAEDTAVYYCARDLGPAGAFDIWGLGTMVTVSSASTKGPSVFPLAPSSKSTSGGTAALGCLVKDYFPEPVTVSWNSGALTSGVHTFPAVLQSSGLYSLSSVVTVPSSSLGTQTYICNVNHKPSNTKVDKKVEPKSCDKTHTCPPCPAPELLGGPSVFLFPPKPKDTLMISRTPEVTCVVVDVSHEDPEVKFNWYVDGVEVHNAKTKPREEQYNSTYRVVSVLTVLHQDWLNGKEYKCKVSNKALPAPIEKTISKAKGQPREPQVYTLPPSRDELTKNQVSLTCLVKGFYPSDIAVEWESNGQPENNYKTTPPVLDSDGSFFLYSKLTVDKSRWQQGNVFSCSVLHEALHAHYTQKSLSLSPG

SEQ ID NO: 975 - protein, 945 aa, synthetic construct
EIVLTQSPGTLSLSPGETATLSCRASQSFSSDLAWYQQKPGQAPRLLIYGASSRATGIPDRFSGSGSGTDFTLTISRLEPADFAVYYCQQYGSSPPVTFGGGTKVEIKRTVAAPSVFIFPPSDEQLKSGTASVVCLLNNFYPREAKVQWKVDNALQSGNSQESVTEQDSKDSTYSLSSTLTLSKADYEKHKVYACEVTHQGLSSPVTKSFNRGECGGGGSGGGGSGGGGSDTVMTQSPLSLPVTPGEPASISCRSSQSLLNSNGYNYLDWYVQKPGQSPQLLIYLGSNRASGVPDRFSGSGSGTDFTLKISRVEAEDVGVYYCMQPLQTPLFTFGPGTKVEIKGGGGSGGSGSGGGGSASGSGQVTLRESGPALVKPTQTLTLTCTFSGFSLSTRGVCVSWIRQPPGKALEWLAFIDWDDDKYYQTSLKTRLTISKDTSKNQVVLTMTNVHPVDTATYYCARISSHHGSSWCTTFDYWGQGALVTVSAASGSGGGSSGEVQLVESGGGLIQPGGSLRLSCAASGVIVSYNYMNWVRQAPGKGLEWVSVIYSGGSTFYADSVRGRFTISRDNSKNTLYLQMNSLRAEDTAVYYCARDLGPAGAFDIWGLGTMVTVSSASTKGPSVFPLAPSSKSTSGGTAALGCLVKDYFPEPVTVSWNSGALTSGVHTFPAVLQSSGLYSLSSVVTVPSSSLGTQTYICNVNHKPSNTKVDKKVEPKSCDKTHTCPPCPAPELLGGPSVFLFPPKPKDTLMISRTPEVTCVVVDVSHEDPEVKFNWYVDGVEVHNAKTKPREEQYNSTYRVVSVLTVLHQDWLNGKEYKCKVSNKALPAPIEKTISKAKGQPREPQVYTLPPSRDELTKNQVSLTCLVKGFYPSDIAVEWESNGQPENNYKTTPPVLDSDGSFFLYSKLTVDKSRWQQGNVFSCSVLHEALHAHYTQKSLSLSPG

SEQ ID NO: 976 - protein, 950 aa, synthetic construct
EIVLTQSPGTLSLSPGETATLSCRASQSFSSDLAWYQQKPGQAPRLLIYGASSRATGIPDRFSGSGSGTDFTLTISRLEPADFAVYYCQQYGSSPPVTFGGGTKVEIKRTVAAPSVFIFPPSDEQLKSGTASVVCLLNNFYPREAKVQWKVDNALQSGNSQESVTEQDSKDSTYSLSSTLTLSKADYEKHKVYACEVTHQGLSSPVTKSFNRGECGGGGSGGGGSGGGGSDTVMTQSPLSLPVTPGEPASISCRSSQSLLNSNGYNYLDWYVQKPGQSPQLLIYLGSNRASGVPDRFSGSGSGTDFTLKISRVEAEDVGVYYCMQPLQTPLFTFGPGTKVEIKGGGGSGGSGSGGGGSASGSGQVTLRESGPALVKPTQTLTLTCTFSGFSLSTRGVCVSWIRQPPGKALEWLAFIDWDDDKYYQTSLKTRLTISKDTSKNQVVLTMTNVHPVDTATYYCARISSHHGSSWCTTFDYWGQGALVTVSAGGGGSASGSGGGSSGEVQLVESGGGLIQPGGSLRLSCAASGVIVSYNYMNWVRQAPGKGLEWVSVIYSGGSTFYADSVRGRFTISRDNSKNTLYLQMNSLRAEDTAVYYCARDLGPAGAFDIWGLGTMVTVSSASTKGPSVFPLAPSSKSTSGGTAALGCLVKDYFPEPVTVSWNSGALTSGVHTFPAVLQSSGLYSLSSVVTVPSSSLGTQTYICNVNHKPSNTKVDKKVEPKSCDKTHTCPPCPAPELLGGPSVFLFPPKPKDTLMISRTPEVTCVVVDVSHEDPEVKFNWYVDGVEVHNAKTKPREEQYNSTYRVVSVLTVLHQDWLNGKEYKCKVSNKALPAPIEKTISKAKGQPREPQVYTLPPSRDELTKNQVSLTCLVKGFYPSDIAVEWESNGQPENNYKTTPPVLDSDGSFFLYSKLTVDKSRWQQGNVFSCSVLHEALHAHYTQKSLSLSPG

SEQ ID NO: 977 - protein, 955 aa, synthetic construct
EIVLTQSPGTLSLSPGETATLSCRASQSFSSDLAWYQQKPGQAPRLLIYGASSRATGIPDRFSGSGSGTDFTLTISRLEPADFAVYYCQQYGSSPPVTFGGGTKVEIKRTVAAPSVFIFPPSDEQLKSGTASVVCLLNNFYPREAKVQWKVDNALQSGNSQESVTEQDSKDSTYSLSSTLTLSKADYEKHKVYACEVTHQGLSSPVTKSFNRGECGGGGSGGGGSGGGGSDTVMTQSPLSLPVTPGEPASISCRSSQSLLNSNGYNYLDWYVQKPGQSPQLLIYLGSNRASGVPDRFSGSGSGTDFTLKISRVEAEDVGVYYCMQPLQTPLFTFGPGTKVEIKGGGGSGGSGSGGGGSASGSGQVTLRESGPALVKPTQTLTLTCTFSGFSLSTRGVCVSWIRQPPGKALEWLAFIDWDDDKYYQTSLKTRLTISKDTSKNQVVLTMTNVHPVDTATYYCARISSHHGSSWCTTFDYWGQGALVTVSAGGSGSGGGGSASGSGGGSSGEVQLVESGGGLIQPGGSLRLSCAASGVIVSYNYMNWVRQAPGKGLEWVSVIYSGGSTFYADSVRGRFTISRDNSKNTLYLQMNSLRAEDTAVYYCARDLGPAGAFDIWGLGTMVTVSSASTKGPSVFPLAPSSKSTSGGTAALGCLVKDYFPEPVTVSWNSGALTSGVHTFPAVLQSSGLYSLSSVVTVPSSSLGTQTYICNVNHKPSNTKVDKKVEPKSCDKTHTCPPCPAPELLGGPSVFLFPPKPKDTLMISRTPEVTCVVVDVSHEDPEVKFNWYVDGVEVHNAKTKPREEQYNSTYRVVSVLTVLHQDWLNGKEYKCKVSNKALPAPIEKTISKAKGQPREPQVYTLPPSRDELTKNQVSLTCLVKGFYPSDIAVEWESNGQPENNYKTTPPVLDSDGSFFLYSKLTVDKSRWQQGNVFSCSVLHEALHAHYTQKSLSLSPG

SEQ ID NO: 978 - DNA, 2835 bp, synthetic construct
  source 1..2835: mol_type = other DNA
gagatcgtgctgacacagagccctggcacactgtcactgtctccaggcgaaacagccacactgagctgtagagccagccagagcttcagcagcgacctggcttggtatcagcagaagcctggacaggcccctcggctgttgatctatggcgcctcttctagagccacaggcatccccgatagattcagcggctctggcagcggcaccgatttcaccctgacaatcagcagactggaacccgccgacttcgccgtgtactactgtcagcagtacggcagcagccctcctgtgacatttggcggcggaacaaaggtggaaatcaaacgtacggtggccgctcccagcgtgttcatcttcccacctagcgacgagcagctgaagtccggcacagcctctgtcgtgtgcctgctgaacaacttctacccccgcgaggccaaagtgcagtggaaggtggacaacgccctgcagagcggcaacagccaggaaagcgtgaccgagcaggacagcaaggactccacctacagcctgagcagcaccctgacactgagcaaggccgactacgagaagcacaaggtgtacgcctgcgaagtgacccaccagggcctgtctagccccgtgaccaagagcttcaaccggggcgagtgtggcggcggaggatctggcggaggtggaagcggaggcggtggaagcgacaccgtgatgacacagagccctctgagcctgcctgtgacacctggcgaacctgccagcatcagctgtagaagcagccagagcctgctgaacagcaacggctacaactacctggattggtacgtgcagaagcccggccagtctcctcagctgctgatctacctgggcagcaatagagccagcggcgtgcccgatagattttctggctctggcagcggcaccgacttcaccctgaagatctctagagtggaagccgaggacgtgggcgtgtactactgtatgcagcctctgcagacccctctgttcacatttggccctggcaccaaggtggaaatcaaaggcggatctgggagtggaggtggtggctctggcggatctgggagtggtggcggaggctctgcttctggatctggacaagtgacactgagagagtctggccccgctctggtcaagcctacacagaccctgacactgacctgcaccttcagcggcttcagcctgtctactagaggcgtgtgcgtgtcctggatcagacagcctcctggaaaggccctggaatggctggccttcatcgactgggacgacgacaagtactaccagaccagcctgaaaacccggctgaccatcagcaaggacaccagcaagaaccaggtggtgctgaccatgaccaacgtgcaccctgtggataccgccacctactactgcgccagaatcagctctcaccacggctccagctggtgtaccaccttcgattattggggccagggcgctctcgtgacagtttctgctggaggcagctccggggaagtgcagctggtggaatcaggcggcggactgattcaacctggcggctctctgagactgtcttgtgctgcttctggcgtgatcgtgtcctacaactacatgaactgggtccgacaggctcccggcaaaggccttgaatgggtgtccgtgatctacagcggcggcagcaccttttacgccgattctgtgcggggcagattcaccatcagccgggacaacagcaagaacaccctgtacctgcagatgaacagcctgagagccgaggacaccgctgtgtactattgcgccagagatctgggacctgccggcgcttttgatatctggggcctgggcacaatggtcaccgtgtctagcgcttcgaccaagggcccatccgtgtttcctctggctcccagcagcaagtctacaagcggaggaacagccgctctgggctgcctggtcaaggattactttcccgagcctgtgaccgtgtcctggaattctggcgctctgacaagcggcgtgcacacctttccagctgtgctgcaaagcagcggcctgtactctctgagcagcgtggtcacagtgcctagctctagcctgggcacccagacctacatctgcaatgtgaaccacaagcctagcaacaccaaggtggacaagaaggtggaacccaagagctgcgataagacccacacatgtcctccatgtcctgctccagaactgctcggcggcccttctgtgttcctgtttcctccaaagcctaaggacaccctgatgatcagcagaacccctgaagtgacctgcgtggtggtggatgtgtctcacgaggaccccgaagtgaagttcaattggtacgtggacggcgtggaagtgcacaacgccaagaccaagcctagagaggaacagtacaacagcacctacagagtggtgtccgtgctgaccgtgctgcaccaggattggctgaacggcaaagagtacaagtgcaaggtgtccaacaaggccctgcctgctcctatcgagaaaaccatcagcaaggccaagggccagcctagggaaccccaggtttacacccttcctccaagccgggatgagctgaccaagaaccaggtgtccctgacatgtctcgtgaagggcttctaccccagcgacattgccgtggaatgggagagcaatggccagcctgagaacaactacaagacaacccctcctgtgctggacagcgacggctcattcttcctgtacagcaagctgacagtcgacaagtccagatggcagcagggcaacgtgttcagttgcagcgtgctgcacgaggccctgcacgctcactacacccagaagtccctgagcctgtctcctgga

SEQ ID NO: 979 - DNA, 2805 bp, synthetic construct
  source 1..2805: mol_type = other DNA
gagatcgtgctgacacagagccctggcacactgtcactgtctccaggcgaaacagccacactgagctgtagagccagccagagcttcagcagcgacctggcttggtatcagcagaagcctggacaggcccctcggctgttgatctatggcgcctcttctagagccacaggcatccccgatagattcagcggctctggcagcggcaccgatttcaccctgacaatcagcagactggaacccgccgacttcgccgtgtactactgtcagcagtacggcagcagccctcctgtgacatttggcggcggaacaaaggtggaaatcaaacgtacggtggccgctcccagcgtgttcatcttcccacctagcgacgagcagctgaagtccggcacagcctctgtcgtgtgcctgctgaacaacttctacccccgcgaggccaaagtgcagtggaaggtggacaacgccctgcagagcggcaacagccaggaaagcgtgaccgagcaggacagcaaggactccacctacagcctgagcagcaccctgacactgagcaaggccgactacgagaagcacaaggtgtacgcctgcgaagtgacccaccagggcctgtctagccccgtgaccaagagcttcaaccggggcgagtgtggcggcggaggatctggcggaggtggaagcggaggcggtggaagcgacaccgtgatgacacagagccctctgagcctgcctgtgacacctggcgaacctgccagcatcagctgtagaagcagccagagcctgctgaacagcaacggctacaactacctggattggtacgtgcagaagcccggccagtctcctcagctgctgatctacctgggcagcaatagagccagcggcgtgcccgatagattttctggctctggcagcggcaccgacttcaccctgaagatctctagagtggaagccgaggacgtgggcgtgtactactgtatgcagcctctgcagacccctctgttcacatttggccctggcaccaaggtggaaatcaaaggcggatctgggagtggtggcggaggctctgcttctggatctggacaagtgacactgagagagtctggccccgctctggtcaagcctacacagaccctgacactgacctgcaccttcagcggcttcagcctgtctactagaggcgtgtgcgtgtcctggatcagacagcctcctggaaaggccctggaatggctggccttcatcgactgggacgacgacaagtactaccagaccagcctgaaaacccggctgaccatcagcaaggacaccagcaagaaccaggtggtgctgaccatgaccaacgtgcaccctgtggataccgccacctactactgcgccagaatcagctctcaccacggctccagctggtgtaccaccttcgattattggggccagggcgctctcgtgacagtttctgctggaggcagctccggggaagtgcagctggtggaatcaggcggcggactgattcaacctggcggctctctgagactgtcttgtgctgcttctggcgtgatcgtgtcctacaactacatgaactgggtccgacaggctcccggcaaaggccttgaatgggtgtccgtgatctacagcggcggcagcaccttttacgccgattctgtgcggggcagattcaccatcagccgggacaacagcaagaacaccctgtacctgcagatgaacagcctgagagccgaggacaccgctgtgtactattgcgccagagatctgggacctgccggcgcttttgatatctggggcctgggcacaatggtcaccgtgtctagcgcttcgaccaagggcccatccgtgtttcctctggctcccagcagcaagtctacaagcggaggaacagccgctctgggctgcctggtcaaggattactttcccgagcctgtgaccgtgtcctggaattctggcgctctgacaagcggcgtgcacacctttccagctgtgctgcaaagcagcggcctgtactctctgagcagcgtggtcacagtgcctagctctagcctgggcacccagacctacatctgcaatgtgaaccacaagcctagcaacaccaaggtggacaagaaggtggaacccaagagctgcgataagacccacacatgtcctccatgtcctgctccagaactgctcggcggcccttctgtgttcctgtttcctccaaagcctaaggacaccctgatgatcagcagaacccctgaagtgacctgcgtggtggtggatgtgtctcacgaggaccccgaagtgaagttcaattggtacgtggacggcgtggaagtgcacaacgccaagaccaagcctagagaggaacagtacaacagcacctacagagtggtgtccgtgctgaccgtgctgcaccaggattggctgaacggcaaagagtacaagtgcaaggtgtccaacaaggccctgcctgctcctatcgagaaaaccatcagcaaggccaagggccagcctagggaaccccaggtttacacccttcctccaagccgggatgagctgaccaagaaccaggtgtccctgacatgtctcgtgaagggcttctaccccagcgacattgccgtggaatgggagagcaatggccagcctgagaacaactacaagacaacccctcctgtgctggacagcgacggctcattcttcctgtacagcaagctgacagtcgacaagtccagatggcagcagggcaacgtgttcagttgcagcgtgctgcacgaggccctgcacgctcactacacccagaagtccctgagcctgtctcctgga

SEQ ID NO: 980 - DNA, 2790 bp, synthetic construct
  source 1..2790: mol_type = other DNA
gagatcgtgctgacacagagccctggcacactgtcactgtctccaggcgaaacagccacactgagctgtagagccagccagagcttcagcagcgacctggcttggtatcagcagaagcctggacaggcccctcggctgttgatctatggcgcctcttctagagccacaggcatccccgatagattcagcggctctggcagcggcaccgatttcaccctgacaatcagcagactggaacccgccgacttcgccgtgtactactgtcagcagtacggcagcagccctcctgtgacatttggcggcggaacaaaggtggaaatcaaacgtacggtggccgctcccagcgtgttcatcttcccacctagcgacgagcagctgaagtccggcacagcctctgtcgtgtgcctgctgaacaacttctacccccgcgaggccaaagtgcagtggaaggtggacaacgccctgcagagcggcaacagccaggaaagcgtgaccgagcaggacagcaaggactccacctacagcctgagcagcaccctgacactgagcaaggccgactacgagaagcacaaggtgtacgcctgcgaagtgacccaccagggcctgtctagccccgtgaccaagagcttcaaccggggcgagtgtggcggcggaggatctggcggaggtggaagcggaggcggtggaagcgacaccgtgatgacacagagccctctgagcctgcctgtgacacctggcgaacctgccagcatcagctgtagaagcagccagagcctgctgaacagcaacggctacaactacctggattggtacgtgcagaagcccggccagtctcctcagctgctgatctacctgggcagcaatagagccagcggcgtgcccgatagattttctggctctggcagcggcaccgacttcaccctgaagatctctagagtggaagccgaggacgtgggcgtgtactactgtatgcagcctctgcagacccctctgttcacatttggccctggcaccaaggtggaaatcaaaggtggcggaggctctgcttctggatctggacaagtgacactgagagagtctggccccgctctggtcaagcctacacagaccctgacactgacctgcaccttcagcggcttcagcctgtctactagaggcgtgtgcgtgtcctggatcagacagcctcctggaaaggccctggaatggctggccttcatcgactgggacgacgacaagtactaccagaccagcctgaaaacccggctgaccatcagcaaggacaccagcaagaaccaggtggtgctgaccatgaccaacgtgcaccctgtggataccgccacctactactgcgccagaatcagctctcaccacggctccagctggtgtaccaccttcgattattggggccagggcgctctcgtgacagtttctgctggaggcagctccggggaagtgcagctggtggaatcaggcggcggactgattcaacctggcggctctctgagactgtcttgtgctgcttctggcgtgatcgtgtcctacaactacatgaactgggtccgacaggctcccggcaaaggccttgaatgggtgtccgtgatctacagcggcggcagcaccttttacgccgattctgtgcggggcagattcaccatcagccgggacaacagcaagaacaccctgtacctgcagatgaacagcctgagagccgaggacaccgctgtgtactattgcgccagagatctgggacctgccggcgcttttgatatctggggcctgggcacaatggtcaccgtgtctagcgcttcgaccaagggcccatccgtgtttcctctggctcccagcagcaagtctacaagcggaggaacagccgctctgggctgcctggtcaaggattactttcccgagcctgtgaccgtgtcctggaattctggcgctctgacaagcggcgtgcacacctttccagctgtgctgcaaagcagcggcctgtactctctgagcagcgtggtcacagtgcctagctctagcctgggcacccagacctacatctgcaatgtgaaccacaagcctagcaacaccaaggtggacaagaaggtggaacccaagagctgcgataagacccacacatgtcctccatgtcctgctccagaactgctcggcggcccttctgtgttcctgtttcctccaaagcctaaggacaccctgatgatcagcagaacccctgaagtgacctgcgtggtggtggatgtgtctcacgaggaccccgaagtgaagttcaattggtacgtggacggcgtggaagtgcacaacgccaagaccaagcctagagaggaacagtacaacagcacctacagagtggtgtccgtgctgaccgtgctgcaccaggattggctgaacggcaaagagtacaagtgcaaggtgtccaacaaggccctgcctgctcctatcgagaaaaccatcagcaaggccaagggccagcctagggaaccccaggtttacacccttcctccaagccgggatgagctgaccaagaaccaggtgtccctgacatgtctcgtgaagggcttctaccccagcgacattgccgtggaatgggagagcaatggccagcctgagaacaactacaagacaacccctcctgtgctggacagcgacggctcattcttcctgtacagcaagctgacagtcgacaagtccagatggcagcagggcaacgtgttcagttgcagcgtgctgcacgaggccctgcacgctcactacacccagaagtccctgagcctgtctcctgga

SEQ ID NO: 981 - DNA, 2835 bp, synthetic construct
  source 1..2835: mol_type = other DNA
gagatcgtgctgacacagagccctggcacactgtcactgtctccaggcgaaacagccacactgagctgtagagccagccagagcttcagcagcgacctggcttggtatcagcagaagcctggacaggcccctcggctgttgatctatggcgcctcttctagagccacaggcatccccgatagattcagcggctctggcagcggcaccgatttcaccctgacaatcagcagactggaacccgccgacttcgccgtgtactactgtcagcagtacggcagcagccctcctgtgacatttggcggcggaacaaaggtggaaatcaaacgtacggtggccgctcccagcgtgttcatcttcccacctagcgacgagcagctgaagtccggcacagcctctgtcgtgtgcctgctgaacaacttctacccccgcgaggccaaagtgcagtggaaggtggacaacgccctgcagagcggcaacagccaggaaagcgtgaccgagcaggacagcaaggactccacctacagcctgagcagcaccctgacactgagcaaggccgactacgagaagcacaaggtgtacgcctgcgaagtgacccaccagggcctgtctagccccgtgaccaagagcttcaaccggggcgagtgtggcggcggaggatctggcggaggtggaagcggaggcggtggaagcgacaccgtgatgacacagagccctctgagcctgcctgtgacacctggcgaacctgccagcatcagctgtagaagcagccagagcctgctgaacagcaacggctacaactacctggattggtacgtgcagaagcccggccagtctcctcagctgctgatctacctgggcagcaatagagccagcggcgtgcccgatagattttctggctctggcagcggcaccgacttcaccctgaagatctctagagtggaagccgaggacgtgggcgtgtactactgtatgcagcctctgcagacccctctgttcacatttggccctggcaccaaggtggaaatcaaaggaggtggtggctctggcggatctgggagtggtggcggaggctctgcttctggatctggacaagtgacactgagagagtctggccccgctctggtcaagcctacacagaccctgacactgacctgcaccttcagcggcttcagcctgtctactagaggcgtgtgcgtgtcctggatcagacagcctcctggaaaggccctggaatggctggccttcatcgactgggacgacgacaagtactaccagaccagcctgaaaacccggctgaccatcagcaaggacaccagcaagaaccaggtggtgctgaccatgaccaacgtgcaccctgtggataccgccacctactactgcgccagaatcagctctcaccacggctccagctggtgtaccaccttcgattattggggccagggcgctctcgtgacagtttctgctgcttctggatctggaggaggcagctccggggaagtgcagctggtggaatcaggcggcggactgattcaacctggcggctctctgagactgtcttgtgctgcttctggcgtgatcgtgtcctacaactacatgaactgggtccgacaggctcccggcaaaggccttgaatgggtgtccgtgatctacagcggcggcagcaccttttacgccgattctgtgcggggcagattcaccatcagccgggacaacagcaagaacaccctgtacctgcagatgaacagcctgagagccgaggacaccgctgtgtactattgcgccagagatctgggacctgccggcgcttttgatatctggggcctgggcacaatggtcaccgtgtctagcgcttcgaccaagggcccatccgtgtttcctctggctcccagcagcaagtctacaagcggaggaacagccgctctgggctgcctggtcaaggattactttcccgagcctgtgaccgtgtcctggaattctggcgctctgacaagcggcgtgcacacctttccagctgtgctgcaaagcagcggcctgtactctctgagcagcgtggtcacagtgcctagctctagcctgggcacccagacctacatctgcaatgtgaaccacaagcctagcaacaccaaggtggacaagaaggtggaacccaagagctgcgataagacccacacatgtcctccatgtcctgctccagaactgctcggcggcccttctgtgttcctgtttcctccaaagcctaaggacaccctgatgatcagcagaacccctgaagtgacctgcgtggtggtggatgtgtctcacgaggaccccgaagtgaagttcaattggtacgtggacggcgtggaagtgcacaacgccaagaccaagcctagagaggaacagtacaacagcacctacagagtggtgtccgtgctgaccgtgctgcaccaggattggctgaacggcaaagagtacaagtgcaaggtgtccaacaaggccctgcctgctcctatcgagaaaaccatcagcaaggccaagggccagcctagggaaccccaggtttacacccttcctccaagccgggatgagctgaccaagaaccaggtgtccctgacatgtctcgtgaagggcttctaccccagcgacattgccgtggaatgggagagcaatggccagcctgagaacaactacaagacaacccctcctgtgctggacagcgacggctcattcttcctgtacagcaagctgacagtcgacaagtccagatggcagcagggcaacgtgttcagttgcagcgtgctgcacgaggccctgcacgctcactacacccagaagtccctgagcctgtctcctgga

SEQ ID NO: 982 - DNA, 2850 bp, synthetic construct
  source 1..2850: mol_type = other DNA
gagatcgtgctgacacagagccctggcacactgtcactgtctccaggcgaaacagccacactgagctgtagagccagccagagcttcagcagcgacctggcttggtatcagcagaagcctggacaggcccctcggctgttgatctatggcgcctcttctagagccacaggcatccccgatagattcagcggctctggcagcggcaccgatttcaccctgacaatcagcagactggaacccgccgacttcgccgtgtactactgtcagcagtacggcagcagccctcctgtgacatttggcggcggaacaaaggtggaaatcaaacgtacggtggccgctcccagcgtgttcatcttcccacctagcgacgagcagctgaagtccggcacagcctctgtcgtgtgcctgctgaacaacttctacccccgcgaggccaaagtgcagtggaaggtggacaacgccctgcagagcggcaacagccaggaaagcgtgaccgagcaggacagcaaggactccacctacagcctgagcagcaccctgacactgagcaaggccgactacgagaagcacaaggtgtacgcctgcgaagtgacccaccagggcctgtctagccccgtgaccaagagcttcaaccggggcgagtgtggcggcggaggatctggcggaggtggaagcggaggcggtggaagcgacaccgtgatgacacagagccctctgagcctgcctgtgacacctggcgaacctgccagcatcagctgtagaagcagccagagcctgctgaacagcaacggctacaactacctggattggtacgtgcagaagcccggccagtctcctcagctgctgatctacctgggcagcaatagagccagcggcgtgcccgatagattttctggctctggcagcggcaccgacttcaccctgaagatctctagagtggaagccgaggacgtgggcgtgtactactgtatgcagcctctgcagacccctctgttcacatttggccctggcaccaaggtggaaatcaaaggaggtggtggctctggcggatctgggagtggtggcggaggctctgcttctggatctggacaagtgacactgagagagtctggccccgctctggtcaagcctacacagaccctgacactgacctgcaccttcagcggcttcagcctgtctactagaggcgtgtgcgtgtcctggatcagacagcctcctggaaaggccctggaatggctggccttcatcgactgggacgacgacaagtactaccagaccagcctgaaaacccggctgaccatcagcaaggacaccagcaagaaccaggtggtgctgaccatgaccaacgtgcaccctgtggataccgccacctactactgcgccagaatcagctctcaccacggctccagctggtgtaccaccttcgattattggggccagggcgctctcgtgacagtttctgctggtggcggaggctctgcttctggatctggaggaggcagctccggggaagtgcagctggtggaatcaggcggcggactgattcaacctggcggctctctgagactgtcttgtgctgcttctggcgtgatcgtgtcctacaactacatgaactgggtccgacaggctcccggcaaaggccttgaatgggtgtccgtgatctacagcggcggcagcaccttttacgccgattctgtgcggggcagattcaccatcagccgggacaacagcaagaacaccctgtacctgcagatgaacagcctgagagccgaggacaccgctgtgtactattgcgccagagatctgggacctgccggcgcttttgatatctggggcctgggcacaatggtcaccgtgtctagcgcttcgaccaagggcccatccgtgtttcctctggctcccagcagcaagtctacaagcggaggaacagccgctctgggctgcctggtcaaggattactttcccgagcctgtgaccgtgtcctggaattctggcgctctgacaagcggcgtgcacacctttccagctgtgctgcaaagcagcggcctgtactctctgagcagcgtggtcacagtgcctagctctagcctgggcacccagacctacatctgcaatgtgaaccacaagcctagcaacaccaaggtggacaagaaggtggaacccaagagctgcgataagacccacacatgtcctccatgtcctgctccagaactgctcggcggcccttctgtgttcctgtttcctccaaagcctaaggacaccctgatgatcagcagaacccctgaagtgacctgcgtggtggtggatgtgtctcacgaggaccccgaagtgaagttcaattggtacgtggacggcgtggaagtgcacaacgccaagaccaagcctagagaggaacagtacaacagcacctacagagtggtgtccgtgctgaccgtgctgcaccaggattggctgaacggcaaagagtacaagtgcaaggtgtccaacaaggccctgcctgctcctatcgagaaaaccatcagcaaggccaagggccagcctagggaaccccaggtttacacccttcctccaagccgggatgagctgaccaagaaccaggtgtccctgacatgtctcgtgaagggcttctaccccagcgacattgccgtggaatgggagagcaatggccagcctgagaacaactacaagacaacccctcctgtgctggacagcgacggctcattcttcctgtacagcaagctgacagtcgacaagtccagatggcagcagggcaacgtgttcagttgcagcgtgctgcacgaggccctgcacgctcactacacccagaagtccctgagcctgtctcctgga

SEQ ID NO: 983 - DNA, 2865 bp, synthetic construct
  source 1..2865: mol_type = other DNA
gagatcgtgctgacacagagccctggcacactgtcactgtctccaggcgaaacagccacactgagctgtagagccagccagagcttcagcagcgacctggcttggtatcagcagaagcctggacaggcccctcggctgttgatctatggcgcctcttctagagccacaggcatccccgatagattcagcggctctggcagcggcaccgatttcaccctgacaatcagcagactggaacccgccgacttcgccgtgtactactgtcagcagtacggcagcagccctcctgtgacatttggcggcggaacaaaggtggaaatcaaacgtacggtggccgctcccagcgtgttcatcttcccacctagcgacgagcagctgaagtccggcacagcctctgtcgtgtgcctgctgaacaacttctacccccgcgaggccaaagtgcagtggaaggtggacaacgccctgcagagcggcaacagccaggaaagcgtgaccgagcaggacagcaaggactccacctacagcctgagcagcaccctgacactgagcaaggccgactacgagaagcacaaggtgtacgcctgcgaagtgacccaccagggcctgtctagccccgtgaccaagagcttcaaccggggcgagtgtggcggcggaggatctggcggaggtggaagcggaggcggtggaagcgacaccgtgatgacacagagccctctgagcctgcctgtgacacctggcgaacctgccagcatcagctgtagaagcagccagagcctgctgaacagcaacggctacaactacctggattggtacgtgcagaagcccggccagtctcctcagctgctgatctacctgggcagcaatagagccagcggcgtgcccgatagattttctggctctggcagcggcaccgacttcaccctgaagatctctagagtggaagccgaggacgtgggcgtgtactactgtatgcagcctctgcagacccctctgttcacatttggccctggcaccaaggtggaaatcaaaggaggtggtggctctggcggatctgggagtggtggcggaggctctgcttctggatctggacaagtgacactgagagagtctggccccgctctggtcaagcctacacagaccctgacactgacctgcaccttcagcggcttcagcctgtctactagaggcgtgtgcgtgtcctggatcagacagcctcctggaaaggccctggaatggctggccttcatcgactgggacgacgacaagtactaccagaccagcctgaaaacccggctgaccatcagcaaggacaccagcaagaaccaggtggtgctgaccatgaccaacgtgcaccctgtggataccgccacctactactgcgccagaatcagctctcaccacggctccagctggtgtaccaccttcgattattggggccagggcgctctcgtgacagtttctgctggcggatctgggagtggtggcggaggctctgcttctggatctggaggaggcagctccggggaagtgcagctggtggaatcaggcggcggactgattcaacctggcggctctctgagactgtcttgtgctgcttctggcgtgatcgtgtcctacaactacatgaactgggtccgacaggctcccggcaaaggccttgaatgggtgtccgtgatctacagcggcggcagcaccttttacgccgattctgtgcggggcagattcaccatcagccgggacaacagcaagaacaccctgtacctgcagatgaacagcctgagagccgaggacaccgctgtgtactattgcgccagagatctgggacctgccggcgcttttgatatctggggcctgggcacaatggtcaccgtgtctagcgcttcgaccaagggcccatccgtgtttcctctggctcccagcagcaagtctacaagcggaggaacagccgctctgggctgcctggtcaaggattactttcccgagcctgtgaccgtgtcctggaattctggcgctctgacaagcggcgtgcacacctttccagctgtgctgcaaagcagcggcctgtactctctgagcagcgtggtcacagtgcctagctctagcctgggcacccagacctacatctgcaatgtgaaccacaagcctagcaacaccaaggtggacaagaaggtggaacccaagagctgcgataagacccacacatgtcctccatgtcctgctccagaactgctcggcggcccttctgtgttcctgtttcctccaaagcctaaggacaccctgatgatcagcagaacccctgaagtgacctgcgtggtggtggatgtgtctcacgaggaccccgaagtgaagttcaattggtacgtggacggcgtggaagtgcacaacgccaagaccaagcctagagaggaacagtacaacagcacctacagagtggtgtccgtgctgaccgtgctgcaccaggattggctgaacggcaaagagtacaagtgcaaggtgtccaacaaggccctgcctgctcctatcgagaaaaccatcagcaaggccaagggccagcctagggaaccccaggtttacacccttcctccaagccgggatgagctgaccaagaaccaggtgtccctgacatgtctcgtgaagggcttctaccccagcgacattgccgtggaatgggagagcaatggccagcctgagaacaactacaagacaacccctcctgtgctggacagcgacggctcattcttcctgtacagcaagctgacagtcgacaagtccagatggcagcagggcaacgtgttcagttgcagcgtgctgcacgaggccctgcacgctcactacacccagaagtccctgagcctgtctcctgga

SEQ ID NO: 984 - protein, 942 aa, synthetic construct
EIVLTQSPGTLSLSPGETATLSCRASQSFSSDLAWYQQKPGQAPRLLIYGASSRATGIPDRFSGSGSGTDFTLTISRLEPADFAVYYCQQYGSSPPVTFGGGTKVEIKRTVAAPSVFIFPPSDEQLKSGTASVVCLLNNFYPREAKVQWKVDNALQSGNSQESVTEQDSKDSTYSLSSTLTLSKADYEKHKVYACEVTHQGLSSPVTKSFNRGECGGGGSGGGGSGGGGSSYVLTQPPSVSVAPGQTARITCGGNNIGTKSVHWYQQKPGQAPVLVISSDSDRPSGVPDRFSGSNSGNTATLTISRVEAGDEADYYCHVWDSSSDHWVFGGGTKLTVLGGGGSGGSGSGGGGSASGSGEVQLVESGGGRVKPGGSLRLSCAASGFTFSSYRMNWVRQAPGKGLEWVSSISSGSSYIYFADSVKGRFTISRDNAKNSLFLRMNNLRVEDTAVYYCARAPTLRHSSGWYDPPGTENSSFDLWGRGTLVTVSSGGSSGEVQLVESGGGLIQPGGSLRLSCAASGVIVSYNYMNWVRQAPGKGLEWVSVIYSGGSTFYADSVRGRFTISRDNSKNTLYLQMNSLRAEDTAVYYCARDLGPAGAFDIWGLGTMVTVSSASTKGPSVFPLAPSSKSTSGGTAALGCLVKDYFPEPVTVSWNSGALTSGVHTFPAVLQSSGLYSLSSVVTVPSSSLGTQTYICNVNHKPSNTKVDKKVEPKSCDKTHTCPPCPAPEAAGGPSVFLFPPKPKDTLMISRTPEVTCVVVDVSHEDPEVKFNWYVDGVEVHNAKTKPREEQYNSTYRVVSVLTVLHQDWLNGKEYKCKVSNKALAAPIEKTISKAKGQPREPQVYTLPPCRDELTKNQVSLWCLVKGFYPSDIAVEWESNGQPENNYKTTPPVLDSDGSFFLYSKLTVDKSRWQQGNVFSCSVLHEALHAHYTQKSLSLSPG

SEQ ID NO: 985 - protein, 940 aa, synthetic construct
EIVLTQSPGTLSLSPGETATLSCRASQSFSSDLAWYQQKPGQAPRLLIYGASSRATGIPDRFSGSGSGTDFTLTISRLEPADFAVYYCQQYGSSPPVTFGGGTKVEIKRTVAAPSVFIFPPSDEQLKSGTASVVCLLNNFYPREAKVQWKVDNALQSGNSQESVTEQDSKDSTYSLSSTLTLSKADYEKHKVYACEVTHQGLSSPVTKSFNRGECGGGGSGGGGSGGGGSDTVMTQSPLSLPVTPGEPASISCRSSQSLLNSNGYNYLDWYVQKPGQSPQLLIYLGSNRASGVPDRFSGSGSGTDFTLKISRVEAEDVGVYYCMQPLQTPLFTFGPGTKVEIKGGGGSGGSGSGGGGSASGSGQVTLRESGPALVKPTQTLTLTCTFSGFSLSTRGVCVSWIRQPPGKALEWLAFIDWDDDKYYQTSLKTRLTISKDTSKNQVVLTMTNVHPVDTATYYCARISSHHGSSWCTTFDYWGQGALVTVSAGGSSGEVQLVESGGGLIQPGGSLRLSCAASGVIVSYNYMNWVRQAPGKGLEWVSVIYSGGSTFYADSVRGRFTISRDNSKNTLYLQMNSLRAEDTAVYYCARDLGPAGAFDIWGLGTMVTVSSASTKGPSVFPLAPSSKSTSGGTAALGCLVKDYFPEPVTVSWNSGALTSGVHTFPAVLQSSGLYSLSSVVTVPSSSLGTQTYICNVNHKPSNTKVDKKVEPKSCDKTHTCPPCPAPEAAGGPSVFLFPPKPKDTLMISRTPEVTCVVVDVSHEDPEVKFNWYVDGVEVHNAKTKPREEQYNSTYRVVSVLTVLHQDWLNGKEYKCKVSNKALAAPIEKTISKAKGQPREPQVCTLPPSRDELTKNQVSLSCAVKGFYPSDIAVEWESNGQPENNYKTTPPVLDSDGSFFLVSKLTVDKSRWQQGNVFSCSVLHEALHAHYTQKSLSLSPG

SEQ ID NO: 986 - DNA, 2826 bp, synthetic construct
  source 1..2826: mol_type = other DNA
gagatcgtgctgacacagagccctggcacactgtcactgtctccaggcgaaacagccacactgagctgtagagccagccagagcttcagcagcgacctggcttggtatcagcagaagcctggacaggcccctcggctgttgatctatggcgcctcttctagagccacaggcatccccgatagattcagcggctctggcagcggcaccgatttcaccctgacaatcagcagactggaacccgccgacttcgccgtgtactactgtcagcagtacggcagcagccctcctgtgacatttggcggcggaacaaaggtggaaatcaaacgtacggtggccgctcccagcgtgttcatcttcccacctagcgacgagcagctgaagtccggcacagcctctgtcgtgtgcctgctgaacaacttctacccccgcgaggccaaagtgcagtggaaggtggacaacgccctgcagagcggcaacagccaggaaagcgtgaccgagcaggacagcaaggactccacctacagcctgagcagcaccctgacactgagcaaggccgactacgagaagcacaaggtgtacgcctgcgaagtgacccaccagggcctgtctagccccgtgaccaagagcttcaaccggggcgagtgtggcggcggaggatctggcggaggtggaagcggaggcggtggaagcagctacgtgctgacacagcctccatccgtgtctgtggctccaggacagaccgccagaatcacatgcggcggcaacaacatcggcaccaagagcgtgcactggtatcagcagaagcctggacaggcccctgtgctcgtgatcagcagcgatagcgatagacctagcggcgtgcccgatagattcagcggcagcaatagcggcaacaccgccacactgaccatcagcagagttgaggctggcgacgaggccgactactactgtcacgtgtgggatagcagcagcgaccactgggttttcggcggaggcacaaagctgacagtgctgggaggtggtggctctggcggatctgggagtggtggcggaggctctgcttctggatctggagaggtgcagctggttgaatctggcggcggaagagtgaagcctggcggatctctgagactgagctgtgccgccagcggcttcaccttcagcagctacagaatgaactgggtccgacaggcccctggcaaaggccttgaatgggtgtccagcatcagcagcggcagctcctacatctacttcgccgacagcgtgaagggcagattcaccatctccagagacaacgccaagaacagcctgttcctgcggatgaacaacctgagagtggaagataccgccgtgtactactgcgccagagcacccacactgagacacagcagcggatggtacgatcctcctggcaccgagaacagcagcttcgatctgtggggcagaggcaccctggtcacagtctcttctggaggcagctccggggaagtgcagctggtggaatcaggcggcggactgattcaacctggcggctctctgagactgtcttgtgctgcttctggcgtgatcgtgtcctacaactacatgaactgggtccgacaggctcccggcaaaggccttgaatgggtgtccgtgatctacagcggcggcagcaccttttacgccgattctgtgcggggcagattcaccatcagccgggacaacagcaagaacaccctgtacctgcagatgaacagcctgagagccgaggacaccgctgtgtactattgcgccagagatctgggacctgccggcgcttttgatatctggggcctgggcacaatggtcaccgtgtctagcgcttcgaccaagggcccatccgtgtttcctctggctcccagcagcaagtctacaagcggaggaacagccgctctgggctgcctggtcaaggattactttcccgagcctgtgaccgtgtcctggaattctggcgctctgacaagcggcgtgcacacctttccagctgtgctgcaaagcagcggcctgtactctctgagcagcgtggtcacagtgcctagctctagcctgggcacccagacctacatctgcaatgtgaaccacaagcctagcaacaccaaggtggacaagaaggtggaacccaagagctgcgataagacccacacatgtcctccatgtcctgctccagaagctgctggcggcccttctgtgttcctgtttcctccaaagcctaaggacaccctgatgatcagcagaacccctgaagtgacctgcgtggtggtggatgtgtctcacgaggaccccgaagtgaagttcaattggtacgtggacggcgtggaagtgcacaacgccaagaccaagcctagagaggaacagtacaacagcacctacagagtggtgtccgtgctgaccgtgctgcaccaggattggctgaacggcaaagagtacaagtgcaaggtgtccaacaaggccctggccgctcctatcgagaaaaccatcagcaaggccaagggccagcctagggaaccccaggtttacacccttcctccatgccgggatgagctgaccaagaaccaggtgtccctgtggtgtctcgtgaagggcttctaccccagcgacattgccgtggaatgggagagcaatggccagcctgagaacaactacaagacaacccctcctgtgctggacagcgacggctcattcttcctgtacagcaagctgacagtcgacaagtccagatggcagcagggcaacgtgttcagttgcagcgtgctgcacgaggccctgcacgcccactacacccagaagtccctgagcctgtctcctgga

SEQ ID NO: 987 - DNA, 2820 bp, synthetic construct
  source 1..2820: mol_type = other DNA
gagatcgtgctgacacagagccctggcacactgtcactgtctccaggcgaaacagccacactgagctgtagagccagccagagcttcagcagcgacctggcttggtatcagcagaagcctggacaggcccctcggctgttgatctatggcgcctcttctagagccacaggcatccccgatagattcagcggctctggcagcggcaccgatttcaccctgacaatcagcagactggaacccgccgacttcgccgtgtactactgtcagcagtacggcagcagccctcctgtgacatttggcggcggaacaaaggtggaaatcaaacgtacggtggccgctcccagcgtgttcatcttcccacctagcgacgagcagctgaagtccggcacagcctctgtcgtgtgcctgctgaacaacttctacccccgcgaggccaaagtgcagtggaaggtggacaacgccctgcagagcggcaacagccaggaaagcgtgaccgagcaggacagcaaggactccacctacagcctgagcagcaccctgacactgagcaaggccgactacgagaagcacaaggtgtacgcctgcgaagtgacccaccagggcctgtctagccccgtgaccaagagcttcaaccggggcgagtgtggcggcggaggatctggcggaggtggaagcggaggcggtggaagcgacaccgtgatgacacagagccctctgagcctgcctgtgacacctggcgaacctgccagcatcagctgtagaagcagccagagcctgctgaacagcaacggctacaactacctggattggtacgtgcagaagcccggccagtctcctcagctgctgatctacctgggcagcaatagagccagcggcgtgcccgatagattttctggctctggcagcggcaccgacttcaccctgaagatctctagagtggaagccgaggacgtgggcgtgtactactgtatgcagcctctgcagacccctctgttcacatttggccctggcaccaaggtggaaatcaaaggaggtggtggctctggcggatctgggagtggtggcggaggctctgcttctggatctggacaagtgacactgagagagtctggccccgctctggtcaagcctacacagaccctgacactgacctgcaccttcagcggcttcagcctgtctactagaggcgtgtgcgtgtcctggatcagacagcctcctggaaaggccctggaatggctggccttcatcgactgggacgacgacaagtactaccagaccagcctgaaaacccggctgaccatcagcaaggacaccagcaagaaccaggtggtgctgaccatgaccaacgtgcaccctgtggataccgccacctactactgcgccagaatcagctctcaccacggctccagctggtgtaccaccttcgattattggggccagggcgctctcgtgacagtttctgctggaggcagctccggggaagtgcagctggtggaatcaggcggcggactgattcaacctggcggctctctgagactgtcttgtgctgcttctggcgtgatcgtgtcctacaactacatgaactgggtccgacaggctcccggcaaaggccttgaatgggtgtccgtgatctacagcggcggcagcaccttttacgccgattctgtgcggggcagattcaccatcagccgggacaacagcaagaacaccctgtacctgcagatgaacagcctgagagccgaggacaccgctgtgtactattgcgccagagatctgggacctgccggcgcttttgatatctggggcctgggcacaatggtcaccgtgtctagcgcttcgaccaagggcccatccgtgtttcctctggctcccagcagcaagtctacaagcggaggaacagccgctctgggctgcctggtcaaggattactttcccgagcctgtgaccgtgtcctggaattctggcgctctgacaagcggcgtgcacacctttccagctgtgctgcaaagcagcggcctgtactctctgagcagcgtggtcacagtgcctagctctagcctgggcacccagacctacatctgcaatgtgaaccacaagcctagcaacaccaaggtggacaagaaggtggaacccaagagctgcgataagacccacacatgtcctccatgtcctgctccagaagctgctggcggcccttctgtgttcctgtttcctccaaagcctaaggacaccctgatgatcagcagaacccctgaagtgacctgcgtggtggtggatgtgtctcacgaggaccccgaagtgaagttcaattggtacgtggacggcgtggaagtgcacaacgccaagaccaagcctagagaggaacagtacaacagcacctacagagtggtgtccgtgctgaccgtgctgcaccaggattggctgaacggcaaagagtacaagtgcaaggtgtccaacaaggccctggccgctcctatcgagaaaaccatcagcaaggccaagggccagcctagggaaccccaggtttgtacccttcctccaagccgggatgagctgaccaagaaccaggtgtccctgagctgtgccgtgaagggcttctaccccagcgacattgccgtggaatgggagagcaatggccagcctgagaacaactacaagacaacccctcctgtgctggacagcgacggctcattcttcctggtgagcaagctgacagtcgacaagtccagatggcagcagggcaacgtgttcagttgcagcgtgctgcacgaggccctgcacgcccactacacccagaagtccctgagcctgtctcctgga

SEQ ID NO: 988 - protein, 105 aa, synthetic construct
DVQLTQFPSSLSASVGDRVTITCRAGQGIPNYISWYHQRPGKAPRLLIYAASTLQSGVPSRFSGSGSGTDFTLTISSLQPEDFGTYYCQQSDTRTFGPGTKLEIK

SEQ ID NO: 989 - protein, 937 aa, synthetic construct
EIVLTQSPATLSVSPGERATLSCRASQSVSSLLAWYQRKPGQPPRLLIYGASTRATGIPARFSGSGSGTEFTLTISSLQSEDFAVYYCQQYNDWWTFGQGTKVEIKRTVAAPSVFIFPPSDEQLKSGTASVVCLLNNFYPREAKVQWKVDNALQSGNSQESVTEQDSKDSTYSLSSTLTLSKADYEKHKVYACEVTHQGLSSPVTKSFNRGECGGGGSGGGGSGGGGSDVQMTQSPSSLSASVGDRVTITCRASQTIVGYLNWYQQQPGRAPKLLIYAASNLQSGVPPRFSGSGSGTDFTLTISDLQPEDFATYYCQQSYLTPPNTFGQGTKLEIKGGGGSGGSGSGGGGSASGSGQVQLVQSGAEVKKPGSSVKVSCKVSGGTFSDSAVSWVRQAPGQGLEWMGRIIPIFSTIEYAQNFQGRVTITADESTTTVYMELSYLGLEDTAVYYCARDRPIAVEYTGNWFDPWGQGTLVTVSSGGSSGQVHLVQSGAEVKKPGASVKVSCKASGYTFTDYFIHWVRQAPGQGLEWMGWINPDDGDTNYAQKFHGWVAMTRDTSINTAYMELSRLKSNDTAVYYCARGTFSLRGFDWFDPWGQGTLVTVSSASTKGPSVFPLAPSSKSTSGGTAALGCLVKDYFPEPVTVSWNSGALTSGVHTFPAVLQSSGLYSLSSVVTVPSSSLGTQTYICNVNHKPSNTKVDKRVEPKSCDKTHTCPPCPAPEFEGGPSVFLFPPKPKDTLYITREPEVTCVVVDVSHEDPEVKFNWYVDGVEVHNAKTKPREEQYNSTYRVVSVLTVLHQDWLNGKEYKCKVSNKALPASIEKTISKAKGQPREPQVYTLPPSREEMTKNQVSLTCLVKGFYPSDIAVEWESNGQPENNYKTTPPVLDSDGSFFLYSKLTVDKSRWQQGNVFSCSVMHEALHNHYTQKSLSLSPGK

SEQ ID NO: 990 - protein, 937 aa, synthetic construct; identical to SEQ ID NO: 989

SEQ ID NO: 991 - DNA, 2811 bp, synthetic construct
  source 1..2811: mol_type = other DNA
gagatcgtgctgacacagtctcccgccacactgagtgtgtctccaggcgaaagagccacactgtcctgtagagccagccagagcgttagctctctgctggcctggtatcagagaaagcctggccagcctcctcggctgctgatctatggcgcttctacaagagccaccggcattcccgccagattttctggctctggcagcggcaccgagttcaccctgacaatctctagcctgcagagcgaggacttcgccgtgtactactgccagcagtacaacgactggtggacctttggccagggcaccaaggtggaaatcaagcgtacggtggccgctcccagcgtgttcatcttcccacctagcgacgagcagctgaagtccggcacagcctctgtcgtgtgcctgctgaacaacttctacccccgcgaggccaaagtgcagtggaaggtggacaacgccctgcagagcggcaacagccaggaaagcgtgaccgagcaggacagcaaggactccacctacagcctgagcagcaccctgacactgagcaaggccgactacgagaagcacaaggtgtacgcctgcgaagtgacccaccagggcctgtctagccccgtgaccaagagcttcaaccggggcgagtgtggcggcggaggatctggcggaggtggaagcggaggcggtggaagcgacgtgcagatgacacagagcccttctagcctgtctgccagcgtgggcgacagagtgaccatcacatgtagagccagccagaccatcgtgggctacctgaactggtatcagcagcagcctggcagagcccctaagctgctgatctacgccgccagcaatctgcagtctggcgtgccacctagattttccggctctggcagcggcaccgatttcaccctgacaatcagcgacctgcagcctgaggacttcgccacctactactgccagcagagctacctgacacctcctaacacctttggccagggcaccaagctggaaatcaagggaggtggtggctctggcggatctgggagtggtggcggaggctctgcttctggatctggacaggttcagctggttcagtctggcgccgaagtgaagaaacctggcagcagcgtgaaggtgtcctgcaaagtgtctggcggcaccttcagcgatagcgccgtgtcttgggttcgacaggctcctggacaaggcctggaatggatgggcagaatcatccccatcttcagcaccatcgagtacgcccagaacttccagggcagagtgaccatcacagccgacgagagcaccaccaccgtgtacatggaactgagctacctgggcctcgaggacaccgccgtgtactactgtgccagagacagacctatcgccgtcgagtacaccggcaattggttcgatccttggggccagggcacactggtcacagtctcttctggaggcagctccgggcaggttcacctggttcagtctggcgccgaagtgaagaaacctggcgcctctgtgaaggtgtcctgcaaggccagcggctacacctttaccgactacttcatccactgggtccgacaggcccctggacaaggacttgaatggatgggctggatcaaccccgacgacggcgataccaattacgcccagaaattccacggctgggtcgccatgaccagagacacctctatcaacaccgcctacatggaactgagccggctgaagtccaacgacaccgccgtgtactattgcgccagaggcacctttagcctgcggggcttcgattggttcgatccttggggacagggcaccctggtcacagtctcttctgcttcgaccaagggcccatccgtgtttcctctggctcccagcagcaagtctacaagcggaggaacagccgctctgggctgcctggtcaaggattactttcccgagcctgtgaccgtgtcctggaattctggcgctctgacaagcggcgtgcacacctttccagctgtgctgcaaagcagcggcctgtactctctgagcagcgtggtcacagtgcctagctctagcctgggcacccagacctacatctgcaatgtgaaccacaagcctagcaacaccaaggtggacaagagagtggaacccaagagctgcgataagacccacacatgtcctccatgtcctgctccagaattcgaaggcggcccttctgtgttcctgtttcctccaaagcctaaggacaccctgtacatcaccagagaacctgaagtgacctgcgtggtggtggatgtgtctcacgaggaccccgaagtgaagttcaattggtacgtggacggcgtggaagtgcacaacgccaagaccaagcctagagaggaacagtacaacagcacctacagagtggtgtccgtgctgaccgtgctgcaccaggattggctgaacggcaaagagtacaagtgcaaggtgtccaacaaggccctgcctgcttccatcgagaaaaccatcagcaaggccaagggccagcctagggaaccccaggtttacacccttcctccaagccgggaagagatgaccaagaaccaggtgtccctgacctgtctggtgaagggcttctaccccagcgacattgccgtggaatgggagagcaatggccagcctgagaacaactacaagacaacccctcctgtgctggacagcgacggctcattcttcctgtacagcaagctgacagtcgacaagtccagatggcagcagggcaacgtgttcagttgcagcgtgatgcacgaggccctgcacaaccactacacccagaagtccctgagcctgtctcctggaaag

SEQ ID NO: 992 - DNA, 2811 bp, synthetic construct; identical to SEQ ID NO: 991
  source 1..2811: mol_type = other DNA

SEQ ID NO: 993 - protein, 935 aa, synthetic construct
EIVLTQSPGTLSLSPGETATLSCRASQSFSSDLAWYQQKPGQAPRLLIYGASSRATGIPDRFSGSGSGTDFTLTISRLEPADFAVYYCQQYGSSPPVTFGGGTKVEIKRTVAAPSVFIFPPSDEQLKSGTASVVCLLNNFYPREAKVQWKVDNALQSGNSQESVTEQDSKDSTYSLSSTLTLSKADYEKHKVYACEVTHQGLSSPVTKSFNRGECGGGGSGGGGSGGGGSDVQMTQSPSSLSASVGDRVTITCRASQTIVGYLNWYQQQPGRAPKLLIYAASNLQSGVPPRFSGSGSGTDFTLTISDLQPEDFATYYCQQSYLTPPNTFGQGTKLEIKGGGGSGGSGSGGGGSASGSGQVQLVQSGAEVKKPGSSVKVSCKVSGGTFSDSAVSWVRQAPGQGLEWMGRIIPIFSTIEYAQNFQGRVTITADESTTTVYMELSYLGLEDTAVYYCARDRPIAVEYTGNWFDPWGQGTLVTVSSGGSSGEVQLVESGGGLIQPGGSLRLSCAASGVIVSYNYMNWVRQAPGKGLEWVSVIYSGGSTFYADSVRGRFTISRDNSKNTLYLQMNSLRAEDTAVYYCARDLGPAGAFDIWGLGTMVTVSSASTKGPSVFPLAPSSKSTSGGTAALGCLVKDYFPEPVTVSWNSGALTSGVHTFPAVLQSSGLYSLSSVVTVPSSSLGTQTYICNVNHKPSNTKVDKRVEPKSCDKTHTCPPCPAPEFEGGPSVFLFPPKPKDTLYITREPEVTCVVVDVSHEDPEVKFNWYVDGVEVHNAKTKPREEQYNSTYRVVSVLTVLHQDWLNGKEYKCKVSNKALPASIEKTISKAKGQPREPQVYTLPPSREEMTKNQVSLTCLVKGFYPSDIAVEWESNGQPENNYKTTPPVLDSDGSFFLYSKLTVDKSRWQQGNVFSCSVMHEALHNHYTQKSLSLSPGK

SEQ ID NO: 994 - protein, 935 aa, synthetic construct; identical to SEQ ID NO: 993

SEQ ID NO: 995 - protein, 2805 aa, synthetic construct
GAGATCGTGCTGACACAGAGCCCTGGCACACTGTCACTGTCTCCAGGCGAAACAGCCACACTGAGCTGTAGAGCCAGCCAGAGCTTCAGCAGCGACCTGGCTTGGTATCAGCAGAAGCCTGGACAGGCCCCTCGGCTGTTGATCTATGGCGCCTCTTCTAGAGCCACAGGCATCCCCGATAGATTCAGCGGCTCTGGCAGCGGCACCGATTTCACCCTGACAATCAGCAGACTGGAACCCGCCGACTTCGCCGTGTACTACTGTCAGCAGTACGGCAGCAGCCCTCCTGTGACATTTGGCGGCGGAACAAAGGTGGAAATCAAACGTACGGTGGCCGCTCCCAGCGTGTTCATCTTCCCACCTAGCGACGAGCAGCTGAAGTCCGGCACAGCCTCTGTCGTGTGCCTGCTGAACAACTTCTACCCCCGCGAGGCCAAAGTGCAGTGGAAGGTGGACAACGCCCTGCAGAGCGGCAACAGCCAGGAAAGCGTGACCGAGCAGGACAGCAAGGACTCCACCTACAGCCTGAGCAGCACCCTGACACTGAGCAAGGCCGACTACGAGAAGCACAAGGTGTACGCCTGCGAAGTGACCCACCAGGGCCTGTCTAGCCCCGTGACCAAGAGCTTCAACCGGGGCGAGTGTGGCGGCGGAGGATCTGGCGGAGGTGGAAGCGGAGGCGGTGGAAGCGACGTGCAGATGACACAGAGCCCTTCTAGCCTGTCTGCCAGCGTGGGCGACAGAGTGACCATCACATGTAGAGCCAGCCAGACCATCGTGGGCTACCTGAACTGGTATCAGCAGCAGCCTGGCAGAGCCCCTAAGCTGCTGATCTACGCCGCCAGCAATCTGCAGTCTGGCGTGCCACCTAGATTTTCCGGCTCTGGCAGCGGCACCGATTTCACCCTGACAATCAGCGACCTGCAGCCTGAGGACTTCGCCACCTACTACTGCCAGCAGAGCTACCTGACACCTCCTAACACCTTTGGCCAGGGCACCAAGCTGGAAATCAAGGGAGGTGGTGGCTCTGGCGGATCTGGGAGTGGTGGCGGAGGCTCTGCTTCTGGATCTGGACAGGTTCAGCTGGTTCAGTCTGGCGCCGAAGTGAAGAAACCTGGCAGCAGCGTGAAGGTGTCCTGCAAAGTGTCTGGCGGCACCTTCAGCGATAGCGCCGTGTCTTGGGTTCGACAGGCTCCTGGACAAGGCCTGGAATGGATGGGCAGAATCATCCCCATCTTCAGCACCATCGAGTACGCCCAGAACTTCCAGGGCAGAGTGACCATCACAGCCGACGAGAGCACCACCACCGTGTACATGGAACTGAGCTACCTGGGCCTCGAGGACACCGCCGTGTACTACTGTGCCAGAGACAGACCTATCGCCGTCGAGTACACCGGCAATTGGTTCGATCCTTGGGGCCAGGGCACACTGGTCACAGTCTCTTCTGGAGGCAGCTCCGGGGAAGTGCAGCTGGTGGAATCAGGCGGCGGACTGATTCAACCTGGCGGCTCTCTGAGACTGTCTTGTGCTGCTTCTGGCGTGATCGTGTCCTACAACTACATGAACTGGGTCCGACAGGCTCCCGGCAAAGGCCTTGAATGGGTGTCCGTGATCTACAGCGGCGGCAGCACCTTTTACGCCGATTCTGTGCGGGGCAGATTCACCATCAGCCGGGACAACAGCAAGAACACCCTGTACCTGCAGATGAACAGCCTGAGAGCCGAGGACACCGCTGTGTACTATTGCGCCAGAGATCTGGGACCTGCCGGCGCTTTTGATATCTGGGGCCTGGGCACAATGGTCACCGTGTCTAGCGCTTCGACCAAGGGCCCATCCGTGTTTCCTCTGGCTCCCAGCAGCAAGTCTACAAGCGGAGGAACAGCCGCTCTGGGCTGCCTGGTCAAGGATTACTTTCCCGAGCCTGTGACCGTGTCCTGGAATTCTGGCGCTCTGACAAGCGGCGTGCACACCTTTCCAGCTGTGCTGCAAAGCAGCGGCCTGTACTCTCTGAGCAGCGTGGTCACAGTGCCTAGCTCTAGCCTGGGCACCCAGACCTACATCTGCAATGTGAACCACAAGCCTAGCAACACCAAGGTGGACAAGAGAGTGGAACCCAAGAGCTGCGATAAGACCCACACATGTCCTCCATGTCCTGCTCCAGAATTCGAAGGCGGCCCTTCTGTGTTCCTGTTTCCTCCAAAGCCTAAGGACACCCTGTACATCACCAGAGAACCTGAAGTGACCTGCGTGGTGGTGGATGTGTCTCACGAGGACCCCGAAGTGAAGTTCAATTGGTACGTGGACGGCGTGGAAGTGCACAACGCCAAGACCAAGCCTAGAGAGGAACAGTACAACAGCACCTACAGAGTGGTGTCCGTGCTGACCGTGCTGCACCAGGATTGGCTGAACGGCAAAGAGTACAAGTGCAAGGTGTCCAACAAGGCCCTGCCTGCTTCCATCGAGAAAACCATCAGCAAGGCCAAGGGCCAGCCTAGGGAACCCCAGGTTTACACCCTTCCTCCAAGCCGGGAAGAGATGACCAAGAACCAGGTGTCCCTGACCTGTCTGGTGAAGGGCTTCTACCCCAGCGACATTGCCGTGGAATGGGAGAGCAATGGCCAGCCTGAGAACAACTACAAGACAACCCCTCCTGTGCTGGACAGCGACGGCTCATTCTTCCTGTACAGCAAGCTGACAGTCGACAAGTCCAGATGGCAGCAGGGCAACGTGTTCAGTTGCAGCGTGATGCACGAGGCCCTGCACAACCACTACACCCAGAAGTCCCTGAGCCTGTCTCCTGGAAAG

SEQ ID NO: 996 - protein, 2805 aa, synthetic construct; identical to SEQ ID NO: 995

SEQ ID NO: 997 - protein, 935 aa, synthetic construct
EIVLTQSPGTLSLSPGETATLSCRASQSFSSDLAWYQQKPGQAPRLLIYGASSRATGIPDRFSGSGSGTDFTLTISRLEPADFAVYYCQQYGSSPPVTFGGGTKVEIKRTVAAPSVFIFPPSDEQLKSGTASVVCLLNNFYPREAKVQWKVDNALQSGNSQESVTEQDSKDSTYSLSSTLTLSKADYEKHKVYACEVTHQGLSSPVTKSFNRGECGGGGSGGGGSGGGGSDVQMTQSPSSLSASVGDRVTITCRASQTIVGYLNWYQQQPGRAPKLLIYAASNLQSGVPPRFSGSGSGTDFTLTISDLQPEDFATYYCQQSYLTPPNTFGQGTKLEIKGGGGSGGSGSGGGGSASGSGQVQLVQSGAEVKKPGSSVKVSCKVSGGTFSDSAVSWVRQAPGQGLEWMGRIIPIFSTIEYAQNFQGRVTITADESTTTVYMELSYLGLEDTAVYYCARDRPIAVEYTGNWFDPWGQGTLVTVSSGGSSGEVQLVESGGGLIQPGGSLRLSCAASGVIVSYNYMNWVRQAPGKGLEWVSVIYSGGSTFYADSVRGRFTISRDNSKNTLYLQMNSLRAEDTAVYYCARDLGPAGAFDIWGLGTMVTVSSASTKGPSVFPLAPSSKSTSGGTAALGCLVKDYFPEPVTVSWNSGALTSGVHTFPAVLQSSGLYSLSSVVTVPSSSLGTQTYICNVNHKPSNTKVDKRVEPKSCDKTHTCPPCPAPEFEGGPSVFLFPPKPKDTLYITREPEVTCVVVDVSHEDPEVKFNWYVDGVEVHNAKTKPREEQYNSTYRVVSVLTVLHQDWLNGKEYKCKVSNKALPASIEKTISKAKGQPREPQVYTLPPCREEMTKNQVSLWCLVKGFYPSDIAVEWESNGQPENNYKTTPPVLDSDGSFFLYSKLTVDKSRWQQGNVFSCSVMHEALHNHYTQKSLSLSPGK

SEQ ID NO: 998 - protein, 937 aa, synthetic construct; identical to SEQ ID NO: 918

SEQ ID NO: 999 - DNA, 2805 bp, synthetic construct
  source 1..2805: mol_type = other DNA
gagatcgtgctgacacagagccctggcacactgtcactgtctccaggcgaaacagccacactgagctgtagagccagccagagcttcagcagcgacctggcttggtatcagcagaagcctggacaggcccctcggctgttgatctatggcgcctcttctagagccacaggcatccccgatagattcagcggctctggcagcggcaccgatttcaccctgacaatcagcagactggaacccgccgacttcgccgtgtactactgtcagcagtacggcagcagccctcctgtgacatttggcggcggaacaaaggtggaaatcaaacgtacggtggccgctcccagcgtgttcatcttcccacctagcgacgagcagctgaagtccggcacagcctctgtcgtgtgcctgctgaacaacttctacccccgcgaggccaaagtgcagtggaaggtggacaacgccctgcagagcggcaacagccaggaaagcgtgaccgagcaggacagcaaggactccacctacagcctgagcagcaccctgacactgagcaaggccgactacgagaagcacaaggtgtacgcctgcgaagtgacccaccagggcctgtctagccccgtgaccaagagcttcaaccggggcgagtgtggcggcggaggatctggcggaggtggaagcggaggcggtggaagcgacgtgcagatgacacagagcccttctagcctgtctgccagcgtgggcgacagagtgaccatcacatgtagagccagccagaccatcgtgggctacctgaactggtatcagcagcagcctggcagagcccctaagctgctgatctacgccgccagcaatctgcagtctggcgtgccacctagattttccggctctggcagcggcaccgatttcaccctgacaatcagcgacctgcagcctgaggacttcgccacctactactgccagcagagctacctgacacctcctaacacctttggccagggcaccaagctggaaatcaagggaggtggtggctctggcggatctgggagtggtggcggaggctctgcttctggatctggacaggttcagctggttcagtctggcgccgaagtgaagaaacctggcagcagcgtgaaggtgtcctgcaaagtgtctggcggcaccttcagcgatagcgccgtgtcttgggttcgacaggctcctggacaaggcctggaatggatgggcagaatcatccccatcttcagcaccatcgagtacgcccagaacttccagggcagagtgaccatcacagccgacgagagcaccaccaccgtgtacatggaactgagctacctgggcctcgaggacaccgccgtgtactactgtgccagagacagacctatcgccgtcgagtacaccggcaattggttcgatccttggggccagggcacactggtcacagtctcttctggaggcagctccggggaagtgcagctggtggaatcaggcggcggactgattcaacctggcggctctctgagactgtcttgtgctgcttctggcgtgatcgtgtcctacaactacatgaactgggtccgacaggctcccggcaaaggccttgaatgggtgtccgtgatctacagcggcggcagcaccttttacgccgattctgtgcggggcagattcaccatcagccgggacaacagcaagaacaccctgtacctgcagatgaacagcctgagagccgaggacaccgctgtgtactattgcgccagagatctgggacctgccggcgcttttgatatctggggcctgggcacaatggtcaccgtgtctagcgcttcgaccaagggcccatccgtgtttcctctggctcccagcagcaagtctacaagcggaggaacagccgctctgggctgcctggtcaaggattactttcccgagcctgtgaccgtgtcctggaattctggcgctctgacaagcggcgtgcacacctttccagctgtgctgcaaagcagcggcctgtactctctgagcagcgtggtcacagtgcctagctctagcctgggcacccagacctacatctgcaatgtgaaccacaagcctagcaacaccaaggtggacaagagagtggaacccaagagctgcgataagacccacacatgtcctccatgtcctgctccagaattcgaaggcggcccttctgtgttcctgtttcctccaaagcctaaggacaccctgtacatcaccagagaacctgaagtgacctgcgtggtggtggatgtgtctcacgaggaccccgaagtgaagttcaattggtacgtggacggcgtggaagtgcacaacgccaagaccaagcctagagaggaacagtacaacagcacctacagagtggtgtccgtgctgaccgtgctgcaccaggattggctgaacggcaaagagtacaagtgcaaggtgtccaacaaggccctgcctgcttccatcgagaaaaccatcagcaaggccaagggccagcctagggaaccccaggtttacacccttcctccatgtcgggaagagatgaccaagaaccaggtgtccctgtggtgtctggtgaagggcttctaccccagcgacattgccgtggaatgggagagcaatggccagcctgagaacaactacaagacaacccctcctgtgctggacagcgacggctcattcttcctgtacagcaagctgacagtcgacaagtccagatggcagcagggcaacgtgttcagttgcagcgtgatgcacgaggccctgcacaaccactacacccagaagtccctgagcctgtctcctggaaag

SEQ ID NO: 1000 - DNA, 2811 bp, synthetic construct
  source 1..2811: mol_type = other DNA
gacgtgcagatgacacagagcccttctagcctgtctgccagcgtgggcgacagagtgaccatcacatgtagagccagccagaccatcgtgggctacctgaactggtatcagcagcagcctggcagagcccctaagctgctgatctacgccgccagcaatctgcagtctggcgtgccacctagattttccggctctggcagcggcaccgatttcaccctgacaatcagcgacctgcagcctgaggacttcgccacctactactgccagcagagctacctgacacctcctaacacctttggccagggcaccaagctggaaatcaagcgtacggtggccgctcccagcgtgttcatcttcccacctagcgacgagcagctgaagtccggcacagcctctgtcgtgtgcctgctgaacaacttctacccccgcgaggccaaagtgcagtggaaggtggacaacgccctgcagagcggcaacagccaggaaagcgtgaccgagcaggacagcaaggactccacctacagcctgagcagcaccctgacactgagcaaggccgactacgagaagcacaaggtgtacgcctgcgaagtgacccaccagggcctgtctagccccgtgaccaagagcttcaaccggggcgagtgtggcggcggaggatctggcggaggtggaagcggaggcggtggaagcgagatcgtgctgacacagtctcccgccacactgagtgtgtctccaggcgaaagagccacactgtcctgtagagccagccagagcgttagctctctgctggcctggtatcagagaaagcctggccagcctcctcggctgctgatctatggcgcttctacaagagccaccggcattcccgccagattttctggctctggcagcggcaccgagttcaccctgacaatctctagcctgcagagcgaggacttcgccgtgtactactgccagcagtacaacgactggtggacctttggccagggcaccaaggtggaaatcaagggaggtggtggctctggcggatctgggagtggtggcggaggctctgcttctggatctggacaggttcacctggttcagtctggcgccgaagtgaagaaacctggcgcctctgtgaaggtgtcctgcaaggccagcggctacacctttaccgactacttcatccactgggtccgacaggcccctggacaaggacttgaatggatgggctggatcaaccccgacgacggcgataccaattacgcccagaaattccacggctgggtcgccatgaccagagacacctctatcaacaccgcctacatggaactgagccggctgaagtctcaggacaccgccgtgtactattgcgccagaggcacctttagcctgcggggcttcgattggttcgatccttggggacagggcaccctggtcacagtctcttctggaggcagctccgggcaggttcagctggttcagtctggcgccgaagtgaagaaacctggcagcagcgtgaaggtgtcctgcaaagtgtctggcggcaccttcagcgatagcgccgtgtcttgggttcgacaggctcctggacaaggcctggaatggatgggcagaatcatccccatcttcagcaccatcgagtacgcccagaacttccagggcagagtgaccatcacagccgacgagagcaccaccaccgtgtacatggaactgagctacctgggcctcgaggacaccgccgtgtactactgtgccagagacagacctatcgccgtcgagtacaccggcaattggttcgatccttggggccagggcacactggtcacagtctcttctgcttcgaccaagggcccatccgtgtttcctctggctcccagcagcaagtctacaagcggaggaacagccgctctgggctgcctggtcaaggattactttcccgagcctgtgaccgtgtcctggaattctggcgctctgacaagcggcgtgcacacctttccagctgtgctgcaaagcagcggcctgtactctctgagcagcgtggtcacagtgcctagctctagcctgggcacccagacctacatctgcaatgtgaaccacaagcctagcaacaccaaggtggacaagagagtggaacccaagagctgcgataagacccacacatgtcctccatgtcctgctccagaattcgaaggcggcccttctgtgttcctgtttcctccaaagcctaaggacaccctgtacatcaccagagaacctgaagtgacctgcgtggtggtggatgtgtctcacgaggaccccgaagtgaagttcaattggtacgtggacggcgtggaagtgcacaacgccaagaccaagcctagagaggaacagtacaacagcacctacagagtggtgtccgtgctgaccgtgctgcaccaggattggctgaacggcaaagagtacaagtgcaaggtgtccaacaaggccctgcctgcttccatcgagaaaaccatcagcaaggccaagggccagcctagggaaccccaggtttgtacccttcctccatcccgggaagagatgaccaagaaccaggtgtccctgtcctgtgccgtgaagggcttctaccccagcgacattgccgtggaatgggagagcaatggccagcctgagaacaactacaagacaacccctcctgtgctggacagcgacggctcattcttcctggtgagcaagctgacagtcgacaagtccagatggcagcagggcaacgtgttcagttgcagcgtgatgcacgaggccctgcacaaccactacacccagaagtccctgagcctgtctcctggaaag

SEQ ID NO: 1001 - protein, 935 aa, synthetic construct; identical to SEQ ID NO: 997

SEQ ID NO: 1002 - protein, 937 aa, synthetic construct
EIVLTQSPATLSVSPGERATLSCRASQSVSSLLAWYQRKPGQPPRLLIYGASTRATGIPARFSGSGSGTEFTLTISSLQSEDFAVYYCQQYNDWWTFGQGTKVEIKRTVAAPSVFIFPPSDEQLKSGTASVVCLLNNFYPREAKVQWKVDNALQSGNSQESVTEQDSKDSTYSLSSTLTLSKADYEKHKVYACEVTHQGLSSPVTKSFNRGECGGGGSGGGGSGGGGSDVQMTQSPSSLSASVGDRVTITCRASQTIVGYLNWYQQQPGRAPKLLIYAASNLQSGVPPRFSGSGSGTDFTLTISDLQPEDFATYYCQQSYLTPPNTFGQGTKLEIKGGGGSGGSGSGGGGSASGSGQVQLVQSGAEVKKPGSSVKVSCKVSGGTFSDSAVSWVRQAPGQGLEWMGRIIPIFSTIEYAQNFQGRVTITADESTTTVYMELSYLGLEDTAVYYCARDRPIAVEYTGNWFDPWGQGTLVTVSSGGSSGQVHLVQSGAEVKKPGASVKVSCKASGYTFTDYFIHWVRQAPGQGLEWMGWINPDDGDTNYAQKFHGWVAMTRDTSINTAYMELSRLKSNDTAVYYCARGTFSLRGFDWFDPWGQGTLVTVSSASTKGPSVFPLAPSSKSTSGGTAALGCLVKDYFPEPVTVSWNSGALTSGVHTFPAVLQSSGLYSLSSVVTVPSSSLGTQTYICNVNHKPSNTKVDKRVEPKSCDKTHTCPPCPAPEFEGGPSVFLFPPKPKDTLYITREPEVTCVVVDVSHEDPEVKFNWYVDGVEVHNAKTKPREEQYNSTYRVVSVLTVLHQDWLNGKEYKCKVSNKALPASIEKTISKAKGQPREPQVCTLPPSREEMTKNQVSLSCAVKGFYPSDIAVEWESNGQPENNYKTTPPVLDSDGSFFLVSKLTVDKSRWQQGNVFSCSVMHEALHNHYTQKSLSLSPGK

SEQ ID NO: 1003 - DNA, 2805 bp, synthetic construct; identical to SEQ ID NO: 999
  source 1..2805: mol_type = other DNA

SEQ ID NO: 1004 - DNA, 2811 bp, synthetic construct
  source 1..2811: mol_type = other DNA
gagatcgtgctgacacagtctcccgccacactgagtgtgtctccaggcgaaagagccacactgtcctgtagagccagccagagcgttagctctctgctggcctggtatcagagaaagcctggccagcctcctcggctgctgatctatggcgcttctacaagagccaccggcattcccgccagattttctggctctggcagcggcaccgagttcaccctgacaatctctagcctgcagagcgaggacttcgccgtgtactactgccagcagtacaacgactggtggacctttggccagggcaccaaggtggaaatcaagcgtacggtggccgctcccagcgtgttcatcttcccacctagcgacgagcagctgaagtccggcacagcctctgtcgtgtgcctgctgaacaacttctacccccgcgaggccaaagtgcagtggaaggtggacaacgccctgcagagcggcaacagccaggaaagcgtgaccgagcaggacagcaaggactccacctacagcctgagcagcaccctgacactgagcaaggccgactacgagaagcacaaggtgtacgcctgcgaagtgacccaccagggcctgtctagccccgtgaccaagagcttcaaccggggcgagtgtggcggcggaggatctggcggaggtggaagcggaggcggtggaagcgacgtgcagatgacacagagcccttctagcctgtctgccagcgtgggcgacagagtgaccatcacatgtagagccagccagaccatcgtgggctacctgaactggtatcagcagcagcctggcagagcccctaagctgctgatctacgccgccagcaatctgcagtctggcgtgccacctagattttccggctctggcagcggcaccgatttcaccctgacaatcagcgacctgcagcctgaggacttcgccacctactactgccagcagagctacctgacacctcctaacacctttggccagggcaccaagctggaaatcaagggaggtggtggctctggcggatctgggagtggtggcggaggctctgcttctggatctggacaggttcagctggttcagtctggcgccgaagtgaagaaacctggcagcagcgtgaaggtgtcctgcaaagtgtctggcggcaccttcagcgatagcgccgtgtcttgggttcgacaggctcctggacaaggcctggaatggatgggcagaatcatccccatcttcagcaccatcgagtacgcccagaacttccagggcagagtgaccatcacagccgacgagagcaccaccaccgtgtacatggaactgagctacctgggcctcgaggacaccgccgtgtactactgtgccagagacagacctatcgccgtcgagtacaccggcaattggttcgatccttggggccagggcacactggtcacagtctcttctggaggcagctccgggcaggttcacctggttcagtctggcgccgaagtgaagaaacctggcgcctctgtgaaggtgtcctgcaaggccagcggctacacctttaccgactacttcatccactgggtccgacaggcccctggacaaggacttgaatggatgggctggatcaaccccgacgacggcgataccaattacgcccagaaattccacggctgggtcgccatgaccagagacacctctatcaacaccgcctacatggaactgagccggctgaagtccaacgacaccgccgtgtactattgcgccagaggcacctttagcctgcggggcttcgattggttcgatccttggggacagggcaccctggtcacagtctcttctgcttcgaccaagggcccatccgtgtttcctctggctcccagcagcaagtctacaagcggaggaacagccgctctgggctgcctggtcaaggattactttcccgagcctgtgaccgtgtcctggaattctggcgctctgacaagcggcgtgcacacctttccagctgtgctgcaaagcagcggcctgtactctctgagcagcgtggtcacagtgcctagctctagcctgggcacccagacctacatctgcaatgtgaaccacaagcctagcaacaccaaggtggacaagagagtggaacccaagagctgcgataagacccacacatgtcctccatgtcctgctccagaattcgaaggcggcccttctgtgttcctgtttcctccaaagcctaaggacaccctgtacatcaccagagaacctgaagtgacctgcgtggtggtggatgtgtctcacgaggaccccgaagtgaagttcaattggtacgtggacggcgtggaagtgcacaacgccaagaccaagcctagagaggaacagtacaacagcacctacagagtggtgtccgtgctgaccgtgctgcaccaggattggctgaacggcaaagagtacaagtgcaaggtgtccaacaaggccctgcctgcttccatcgagaaaaccatcagcaaggccaagggccagcctagggaaccccaggtttgtacccttcctccatcccgggaagagatgaccaagaaccaggtgtccctgtcctgtgccgtgaagggcttctaccccagcgacattgccgtggaatgggagagcaatggccagcctgagaacaactacaagacaacccctcctgtgctggacagcgacggctcattcttcctggtgagcaagctgacagtcgacaagtccagatggcagcagggcaacgtgttcagttgcagcgtgatgcacgaggccctgcacaaccactacacccagaagtccctgagcctgtctcctggaaag

SEQ ID NO: 1005 - protein, 935 aa, synthetic construct; identical to SEQ ID NO: 720

SEQ ID NO: 1006 - protein, 937 aa, synthetic construct; identical to SEQ ID NO: 918

SEQ ID NO: 1007 - DNA, 2805 bp, synthetic construct; identical to SEQ ID NO: 722
  source 1..2805: mol_type = other DNA

SEQ ID NO: 1008 - DNA, 2811 bp, synthetic construct; identical to SEQ ID NO: 1000
  source 1..2811: mol_type = other DNA

SEQ ID NO: 1009 - protein, 935 aa, synthetic construct; identical to SEQ ID NO: 720

SEQ ID NO: 1010 - protein, 937 aa, synthetic construct; identical to SEQ ID NO: 1002

SEQ ID NO: 1011 - DNA, 2805 bp, synthetic construct; identical to SEQ ID NO: 722
  source 1..2805: mol_type = other DNA

SEQ ID NO: 1012 - DNA, 2811 bp, synthetic construct; identical to SEQ ID NO: 1004
  source 1..2811: mol_type = other DNA

SEQ ID NO: 1013 - protein, 935 aa, synthetic construct
DIQMTQSPSSLSASVGDRVTITCQASQDINNFLNWYQQKPGKAPKLLIYDASNLETGVPSRFSGSGSGTDFTFTIISLQPEDIATYYCQHYDNPPYTFGQGTKLEIKRTVAAPSVFIFPPSDEQLKSGTASVVCLLNNFYPREAKVQWKVDNALQSGNSQESVTEQDSKDSTYSLSSTLTLSKADYEKHKVYACEVTHQGLSSPVTKSFNRGECGGGGSGGGGSGGGGSDVQMTQSPSSLSASVGDRVTITCRASQTIVGYLNWYQQQPGRAPKLLIYAASNLQSGVPPRFSGSGSGTDFTLTISDLQPEDFATYYCQQSYLTPPNTFGQGTKLEIKGGGGSGGSGSGGGGSASGSGQVQLVQSGAEVKKPGSSVKVSCKVSGGTFSDSAVSWVRQAPGQGLEWMGRIIPIFSTIEYAQNFQGRVTITADESTTTVYMELSYLGLEDTAVYYCARDRPIAVEYTGNWFDPWGQGTLVTVSSGGSSGEEQLVVSGGGLVQPGGSLRLSCTASEITVIRNYMNWVRQAPGKGLEWVSVIYPGGSTFYADSVQGRFTISRDNSKNTLYLQMNSLRAEDTAVYYCSRPIVGGRRGMDVWGQGTTVTVSSASTKGPSVFPLAPSSKSTSGGTAALGCLVKDYFPEPVTVSWNSGALTSGVHTFPAVLQSSGLYSLSSVVTVPSSSLGTQTYICNVNHKPSNTKVDKRVEPKSCDKTHTCPPCPAPEFEGGPSVFLFPPKPKDTLYITREPEVTCVVVDVSHEDPEVKFNWYVDGVEVHNAKTKPREEQYNSTYRVVSVLTVLHQDWLNGKEYKCKVSNKALPASIEKTISKAKGQPREPQVYTLPPSREEMTKNQVSLTCLVKGFYPSDIAVEWESNGQPENNYKTTPPVLDSDGSFFLYSKLTVDKSRWQQGNVFSCSVMHEALHNHYTQKSLSLSPGK

SEQ ID NO: 1014 - protein, 935 aa, synthetic construct; identical to SEQ ID NO: 1013

SEQ ID NO: 1015 - DNA, 2805 bp, synthetic construct
  source 1..2805: mol_type = other DNA
gacatccagatgacacagagccctagcagcctgtctgccagcgtgggagacagagtgaccattacctgtcaggccagccaggatatcaacaacttcctgaactggtatcagcagaagcccggcaaggcccctaagctgctgatctacgatgccagcaacctggaaaccggcgtgcccagcagattttctggcagcggctctggcaccgacttcaccttcaccatcatcagcctgcagcctgaggatatcgccacctactactgccagcactacgacaaccctccatacacctttggccagggcaccaagctggaaatcaagcggacagtggccgctcctagcgtgttcatctttccacctagcgacgagcagctgaagtccggcacagcctctgttgtgtgcctgctgaacaacttctaccccagagaagccaaggtgcagtggaaggtggacaacgccctgcagagcggcaatagccaagagagcgtgaccgagcaggacagcaaggactctacctacagcctgagcagcaccctgacactgagcaaggccgactacgagaagcacaaagtgtacgcctgcgaagtgacccaccagggcctttctagccctgtgaccaagagcttcaacaggggcgaatgtggcggcggaggatctggcggaggtggaagtggcggaggcggttctgatgtgcagatgacccagtctccttccagcctgtccgcctctgtgggcgatcgcgtgaccatcacatgtagagcctctcagaccatcgtgggctacctcaattggtatcaacagcagcctggacgggctcccaaactgctgatatacgccgcctccaatctgcagtctggcgtgccacctagattcagcggatctggaagcggcacagatttcaccctgaccatcagcgatctgcagcccgaagattttgccacgtattattgccagcagagctacctgacacctcctaataccttcggacagggaacaaagctcgagatcaaaggtggtggcggcagcggaggttctggtagcggaggtggtggatctgcctctggatctggacaggtgcagctggttcagagcggagccgaagtgaagaaacctggcagcagcgtgaaggtgtcctgcaaagtgtctggcggcaccttcagcgatagcgccgtgtcttgggttcgacaggctcctggacaaggcctggaatggatgggcagaatcatccccatcttcagcaccatcgagtacgcccagaacttccagggcagagtgacaatcaccgccgacgagagcaccaccaccgtgtacatggaactgtcctacctgggcctcgaggacaccgccgtgtactactgtgccagagacagacctatcgccgtcgagtacaccggcaattggttcgatccttggggccagggaaccctggtcacagttagtagcggtggcagctctggcgaggaacagctggttgtttcaggtggcggactggttcagcctggcggatctctgagactgagctgtaccgccagcgagatcaccgtgatccggaactacatgaactgggtccgacaagccccaggcaagggacttgaatgggtgtccgtgatctacccaggcggcagcaccttttacgccgattctgtgcagggccgctttaccatcagccgggacaacagcaagaacaccctgtacctgcagatgaactccctgagagccgaggatacagcagtgtactattgcagcagacccatcgttggcggtagaagaggcatggatgtgtggggacagggcacaaccgtgacagtgtctagcgcctctacaaagggccccagcgttttcccactggctcctagcagcaagagcacaagcggaggaactgctgccctgggctgtctggtcaaggactactttcctgagcctgtgaccgtgtcctggaactctggcgctctgactagcggcgtgcacacatttccagccgtgctgcaaagcagcggcctgtactctctgagcagcgttgtgacagtgcccagctctagcctgggcacccagacctacatctgcaatgtgaaccacaagcctagcaacaccaaggtcgacaagagagtggaacccaagtcctgcgacaagacccacacctgtcctccatgtcctgcacctgagtttgaaggcggcccttccgtgttcctgtttcctccaaagcctaaggataccctgtacatcacccgcgagcctgaagtgacctgtgtggtggtcgatgtgtcccacgaggacccagaagtgaagtttaattggtacgtggacggcgtggaagtgcacaatgccaagaccaagcctagagaggaacagtacaacagcacctacagagtggtgtctgtgctgacagtgctgcaccaggactggctgaacggcaaagagtacaagtgcaaggtgtccaacaaggccctgcctgccagcatcgagaaaaccatcagcaaggccaagggccagcctagggaaccccaggtttacacactgcctccaagccgggaagagatgaccaagaaccaggtgtccctgacctgcctcgtgaagggcttctaccctagcgacattgccgtggaatgggagagcaatggccagcctgagaacaactacaagacaacccctcctgtgctggactccgacggctcattcttcctgtacagcaagctgaccgtggacaagagcagatggcagcagggcaacgtgttcagctgcagcgtgatgcacgaggccctgcataaccactacacccagaaaagcctgtctctgagccccggcaaa

SEQ ID NO: 1016 - DNA, 2805 bp, synthetic construct; identical to SEQ ID NO: 1015
  source 1..2805: mol_type = other DNA

SEQ ID NO: 1017 - protein, 935 aa, synthetic construct
DIQMTQSPSSLSASVGDRVTITCQASQDINNFLNWYQQKPGKAPKLLIYDASNLETGVPSRFSGSGSGTDFTFTIISLQPEDIATYYCQHYDNPPYTFGQGTKLEIKRTVAAPSVFIFPPSDEQLKSGTASVVCLLNNFYPREAKVQWKVDNALQSGNSQESVTEQDSKDSTYSLSSTLTLSKADYEKHKVYACEVTHQGLSSPVTKSFNRGECGGGGSGGGGSGGGGSDVQMTQSPSSLSASVGDRVTITCRASQTIVGYLNWYQQQPGRAPKLLIYAASNLQSGVPPRFSGSGSGTDFTLTISDLQPEDFATYYCQQSYLTPPNTFGQGTKLEIKGGGGSGGSGSGGGGSASGSGQVQLVQSGAEVKKPGSSVKVSCKVSGGTFSDSAVSWVRQAPGQGLEWMGRIIPIFSTIEYAQNFQGRVTITADESTTTVYMELSYLGLEDTAVYYCARDRPIAVEYTGNWFDPWGQGTLVTVSSGGSSGEEQLVVSGGGLVQPGGSLRLSCTASEITVIRNYMNWVRQAPGKGLEWVSVIYPGGSTFYADSVQGRFTISRDNSKNTLYLQMNSLRAEDTAVYYCSRPIVGGRRGMDVWGQGTTVTVSSASTKGPSVFPLAPSSKSTSGGTAALGCLVKDYFPEPVTVSWNSGALTSGVHTFPAVLQSSGLYSLSSVVTVPSSSLGTQTYICNVNHKPSNTKVDKRVEPKSCDKTHTCPPCPAPEFEGGPSVFLFPPKPKDTLYITREPEVTCVVVDVSHEDPEVKFNWYVDGVEVHNAKTKPREEQYNSTYRVVSVLTVLHQDWLNGKEYKCKVSNKALPASIEKTISKAKGQPREPQVYTLPPCREEMTKNQVSLWCLVKGFYPSDIAVEWESNGQPENNYKTTPPVLDSDGSFFLYSKLTVDKSRWQQGNVFSCSVMHEALHNHYTQKSLSLSPGK

SEQ ID NO: 1018 - protein, 937 aa, synthetic construct; identical to SEQ ID NO: 918

SEQ ID NO: 1019 - DNA, 2805 bp, synthetic construct
  source 1..2805: mol_type = other DNA
gacatccagatgacacagagccctagcagcctgtctgccagcgtgggagacagagtgaccattacctgtcaggccagccaggatatcaacaacttcctgaactggtatcagcagaagcccggcaaggcccctaagctgctgatctacgatgccagcaacctggaaaccggcgtgcccagcagattttctggcagcggctctggcaccgacttcaccttcaccatcatcagcctgcagcctgaggatatcgccacctactactgccagcactacgacaaccctccatacacctttggccagggcaccaagctggaaatcaagcggacagtggccgctcctagcgtgttcatctttccacctagcgacgagcagctgaagtccggcacagcctctgttgtgtgcctgctgaacaacttctaccccagagaagccaaggtgcagtggaaggtggacaacgccctgcagagcggcaatagccaagagagcgtgaccgagcaggacagcaaggactctacctacagcctgagcagcaccctgacactgagcaaggccgactacgagaagcacaaagtgtacgcctgcgaagtgacccaccagggcctttctagccctgtgaccaagagcttcaacaggggcgaatgtggcggcggaggatctggcggaggtggaagtggcggaggcggttctgatgtgcagatgacccagtctccttccagcctgtccgcctctgtgggcgatcgcgtgaccatcacatgtagagcctctcagaccatcgtgggctacctcaattggtatcaacagcagcctggacgggctcccaaactgctgatatacgccgcctccaatctgcagtctggcgtgccacctagattcagcggatctggaagcggcacagatttcaccctgaccatcagcgatctgcagcccgaagattttgccacgtattattgccagcagagctacctgacacctcctaataccttcggacagggaacaaagctcgagatcaaaggtggtggcggcagcggaggttctggtagcggaggtggtggatctgcctctggatctggacaggtgcagctggttcagagcggagccgaagtgaagaaacctggcagcagcgtgaaggtgtcctgcaaagtgtctggcggcaccttcagcgatagcgccgtgtcttgggttcgacaggctcctggacaaggcctggaatggatgggcagaatcatccccatcttcagcaccatcgagtacgcccagaacttccagggcagagtgacaatcaccgccgacgagagcaccaccaccgtgtacatggaactgtcctacctgggcctcgaggacaccgccgtgtactactgtgccagagacagacctatcgccgtcgagtacaccggcaattggttcgatccttggggccagggaaccctggtcacagttagtagcggtggcagctctggcgaggaacagctggttgtttcaggtggcggactggttcagcctggcggatctctgagactgagctgtaccgccagcgagatcaccgtgatccggaactacatgaactgggtccgacaagccccaggcaagggacttgaatgggtgtccgtgatctacccaggcggcagcaccttttacgccgattctgtgcagggccgctttaccatcagccgggacaacagcaagaacaccctgtacctgcagatgaactccctgagagccgaggatacagcagtgtactattgcagcagacccatcgttggcggtagaagaggcatggatgtgtggggacagggcacaaccgtgaccgtttcttctgcttcgaccaagggcccatccgtgtttcctctggctcccagcagcaagtctacaagcggaggaacagccgctctgggctgcctggtcaaggattactttcccgagcctgtgaccgtgtcctggaattctggcgctctgacaagcggcgtgcacacctttccagctgtgctgcaaagcagcggcctgtactctctgagcagcgtggtcacagtgcctagctctagcctgggcacccagacctacatctgcaatgtgaaccacaagcctagcaacaccaaggtggacaagagagtggaacccaagagctgcgataagacccacacatgtcctccatgtcctgctccagaattcgaaggcggcccttctgtgttcctgtttcctccaaagcctaaggacaccctgtacatcaccagagaacctgaagtgacctgcgtggtggtggatgtgtctcacgaggaccccgaagtgaagttcaattggtacgtggacggcgtggaagtgcacaacgccaagaccaagcctagagaggaacagtacaacagcacctacagagtggtgtccgtgctgaccgtgctgcaccaggattggctgaacggcaaagagtacaagtgcaaggtgtccaacaaggccctgcctgcttccatcgagaaaaccatcagcaaggccaagggccagcctagggaaccccaggtttacacccttcctccatgtcgggaagagatgaccaagaaccaggtgtccctgtggtgtctggtgaagggcttctaccccagcgacattgccgtggaatgggagagcaatggccagcctgagaacaactacaagacaacccctcctgtgctggacagcgacggctcattcttcctgtacagcaagctgacagtcgacaagtccagatggcagcagggcaacgtgttcagttgcagcgtgatgcacgaggccctgcacaaccactacacccagaagtccctgagcctgtctcctggaaag

SEQ ID NO: 1020 - DNA, 2811 bp, synthetic construct; identical to SEQ ID NO: 1000
  source 1..2811: mol_type = other DNA

SEQ ID NO: 1021 - protein, 935 aa, synthetic construct
DVQMTQSPSSLSASVGDRVTITCRASQTIVGYLNWYQQQPGRAPKLLIYAASNLQSGVPPRFSGSGSGTDFTLTISDLQPEDFATYYCQQSYLTPPNTFGQGTKLEIKRTVAAPSVFIFPPSDEQLKSGTASVVCLLNNFYPREAKVQWKVDNALQSGNSQESVTEQDSKDSTYSLSSTLTLSKADYEKHKVYACEVTHQGLSSPVTKSFNRGECGGGGSGGGGSGGGGSDIQMTQSPSSLSASVGDRVTITCQASQDINNFLNWYQQKPGKAPKLLIYDASNLETGVPSRFSGSGSGTDFTFTIISLQPEDIATYYCQHYDNPPYTFGQGTKLEIKGGGGSGGSGSGGGGSASGSGEEQLVVSGGGLVQPGGSLRLSCTASEITVIRNYMNWVRQAPGKGLEWVSVIYPGGSTFYADSVQGRFTISRDNSKNTLYLQMNSLRAEDTAVYYCSRPIVGGRRGMDVWGQGTTVTVSSGGSSGQVQLVQSGAEVKKPGSSVKVSCKVSGGTFSDSAVSWVRQAPGQGLEWMGRIIPIFSTIEYAQNFQGRVTITADESTTTVYMELSYLGLEDTAVYYCARDRPIAVEYTGNWFDPWGQGTLVTVSSASTKGPSVFPLAPSSKSTSGGTAALGCLVKDYFPEPVTVSWNSGALTSGVHTFPAVLQSSGLYSLSSVVTVPSSSLGTQTYICNVNHKPSNTKVDKRVEPKSCDKTHTCPPCPAPEFEGGPSVFLFPPKPKDTLYITREPEVTCVVVDVSHEDPEVKFNWYVDGVEVHNAKTKPREEQYNSTYRVVSVLTVLHQDWLNGKEYKCKVSNKALPASIEKTISKAKGQPREPQVYTLPPCREEMTKNQVSLWCLVKGFYPSDIAVEWESNGQPENNYKTTPPVLDSDGSFFLYSKLTVDKSRWQQGNVFSCSVMHEALHNHYTQKSLSLSPGK

SEQ ID NO: 1022 - protein, 945 aa, synthetic construct; identical to SEQ ID NO: 729

SEQ ID NO: 1023 - DNA, 2805 bp, synthetic construct
  source 1..2805: mol_type = other DNA
gacgtgcagatgacacagagcccttctagcctgtctgccagcgtgggcgacagagtgaccatcacatgtagagccagccagaccatcgtgggctacctgaactggtatcagcagcagcctggcagagcccctaagctgctgatctacgccgccagcaatctgcagtctggcgtgccacctagattttccggctctggcagcggcaccgatttcaccctgacaatcagcgacctgcagcctgaggacttcgccacctactactgccagcagagctacctgacacctcctaacacctttggccagggcaccaagctggaaatcaagcggacagtggccgctcctagcgtgttcatctttccacctagcgacgagcagctgaagtctggcacagcctctgtcgtgtgcctgctgaacaacttctaccccagagaagccaaggtgcagtggaaggtggacaacgctctgcagtccggcaacagccaagagagcgtgacagagcaggacagcaaggactccacatacagcctgagcagcacactgaccctgagcaaggccgactacgagaagcacaaagtgtacgcctgcgaagtgacccaccagggcctttctagccctgtgaccaagagcttcaacagaggcgaatgtggcggcggaggatctggcggaggtggaagcggaggcggtggatctgatatccagatgacccagtctcctagcagcctgtccgcctctgtgggagatcgcgtgacaattacctgtcaggccagccaggatatcaacaacttcctcaattggtatcaacagaagcccggaaaggctcccaaactgctcatctacgatgcctccaacctggaaaccggcgtgcccagcagattttctggaagcggctccggcaccgactttaccttcaccatcatcagcctgcagccagaagatatcgccacgtattattgtcagcactacgacaaccctccatacacattcggccaggggacaaaactcgagatcaaaggtggcggaggcagcggcggatctggttcaggcggtggtggttctgcttctggctctggcgaagaacagctggtggtttcaggcggaggacttgttcagcctggcggctctctgagactgagctgtaccgccagcgagatcaccgtgatccggaactacatgaactgggtccgacaggcccctggcaaaggccttgaatgggtgtccgtgatctatcctggcggcagcaccttctacgccgattctgtgcagggcagattcaccatctccagagacaacagcaagaacaccctgtacctgcagatgaactccctgagagccgaggacaccgccgtgtactactgtagcagacctatcgtcggcggtagaagaggcatggatgtgtggggccagggaaccaccgtgacagttagttctggcggaagctctggccaggtgcagctggttcaatctggcgccgaagtgaagaaacccggcagctctgtgaaggtgtcctgcaaagtttccggcggcaccttcagcgatagcgccgtgtcttgggttcgacaagccccaggacaaggactggaatggatgggcagaatcatccccatcttcagcaccatcgagtacgcccagaacttccagggcagagtgactattaccgccgatgagagcaccaccacagtgtacatggaactgtcctacctgggcctcgaggatacagctgtgtactattgcgccagagacaggcctatcgccgtcgagtacaccggcaattggttcgatccttggggacagggcaccctggtcacagtctcttctgcttcgaccaagggcccatccgtgtttcctctggctcccagcagcaagtctacaagcggaggaacagccgctctgggctgcctggtcaaggattactttcccgagcctgtgaccgtgtcctggaattctggcgctctgacaagcggcgtgcacacctttccagctgtgctgcaaagcagcggcctgtactctctgagcagcgtggtcacagtgcctagctctagcctgggcacccagacctacatctgcaatgtgaaccacaagcctagcaacaccaaggtggacaagagagtggaacccaagagctgcgataagacccacacatgtcctccatgtcctgctccagaattcgaaggcggcccttctgtgttcctgtttcctccaaagcctaaggacaccctgtacatcaccagagaacctgaagtgacctgcgtggtggtggatgtgtctcacgaggaccccgaagtgaagttcaattggtacgtggacggcgtggaagtgcacaacgccaagaccaagcctagagaggaacagtacaacagcacctacagagtggtgtccgtgctgaccgtgctgcaccaggattggctgaacggcaaagagtacaagtgcaaggtgtccaacaaggccctgcctgcttccatcgagaaaaccatcagcaaggccaagggccagcctagggaaccccaggtttacacccttcctccatgtcgggaagagatgaccaagaaccaggtgtccctgtggtgtctggtgaagggcttctaccccagcgacattgccgtggaatgggagagcaatggccagcctgagaacaactacaagacaacccctcctgtgctggacagcgacggctcattcttcctgtacagcaagctgacagtcgacaagtccagatggcagcagggcaacgtgttcagttgcagcgtgatgcacgaggccctgcacaaccactacacccagaagtccctgagcctgtctcctggaaag

SEQ ID NO: 1024 - DNA, 2835 bp, synthetic construct; identical to SEQ ID NO: 731
  source 1..2835: mol_type = other DNA

SEQ ID NO: 1025 - protein, 935 aa, synthetic construct; identical to SEQ ID NO: 1021

SEQ ID NO: 1026 - protein, 940 aa, synthetic construct
DIQMTQSPSSLSASVGDRVTITCQASQDISNYLNWYQQKPGKAPKVLISDASNLETGVPSRFSGSGSGTDFIFTISSLQLEDVATYYCQQHDNVPLTFGGGTKVEIKRTVAAPSVFIFPPSDEQLKSGTASVVCLLNNFYPREAKVQWKVDNALQSGNSQESVTEQDSKDSTYSLSSTLTLSKADYEKHKVYACEVTHQGLSSPVTKSFNRGECGGGGSGGGGSGGGGSEIVLTQSPATLSVSPGERATLSCRASQSVSSLLAWYQRKPGQPPRLLIYGASTRATGIPARFSGSGSGTEFTLTISSLQSEDFAVYYCQQYNDWWTFGQGTKVEIKGGGGSGGSGSGGGGSASGSGQVHLVQSGAEVKKPGASVKVSCKASGYTFTDYFIHWVRQAPGQGLEWMGWINPDDGDTNYAQKFHGWVAMTRDTSINTAYMELSRLKSNDTAVYYCARGTFSLRGFDWFDPWGQGTLVTVSSGGSSGQVQLVQSGAEVKKPGASVKVSCKASGYSFTTNYAMHWVRQAPGQRLEWMGWINVGNDNTKYSQKFQGRVTITRDTSASTVNMELSSLRSEDTAVYYCARSTPFYDRRGFYFLGYFQHWGQGTLVTVSSASTKGPSVFPLAPSSKSTSGGTAALGCLVKDYFPEPVTVSWNSGALTSGVHTFPAVLQSSGLYSLSSVVTVPSSSLGTQTYICNVNHKPSNTKVDKRVEPKSCDKTHTCPPCPAPEFEGGPSVFLFPPKPKDTLYITREPEVTCVVVDVSHEDPEVKFNWYVDGVEVHNAKTKPREEQYNSTYRVVSVLTVLHQDWLNGKEYKCKVSNKALPASIEKTISKAKGQPREPQVCTLPPSREEMTKNQVSLSCAVKGFYPSDIAVEWESNGQPENNYKTTPPVLDSDGSFFLVSKLTVDKSRWQQGNVFSCSVMHEALHNHYTQKSLSLSPGK

SEQ ID NO: 1027 - DNA, 2805 bp, synthetic construct; identical to SEQ ID NO: 1023
  source 1..2805: mol_type = other DNA

SEQ ID NO: 1028 - DNA, 2820 bp, synthetic construct
  source 1..2820: mol_type = other DNA
gacatccagatgacacagagccctagcagcctgtctgccagcgtgggagacagagtgaccattacctgtcaggccagccaggacatcagcaactacctgaactggtatcagcagaagcccggcaaggcccctaaggtgctgatctccgatgccagcaatctggaaaccggcgtgcccagcagattttctggcagcggctctggcaccgacttcatcttcacaatcagcagcctgcagctggaagatgtggccacctactactgccagcagcacgacaatgtgcccctgacatttggcggaggcaccaaggtggaaatcaagcggacagtggccgctcctagcgtgttcatctttccacctagcgacgagcagctgaagtccggcacagcctctgttgtgtgcctgctgaacaacttctaccccagagaagccaaggtgcagtggaaggtggacaacgccctgcagagcggcaatagccaagagagcgtgaccgagcaggacagcaaggactctacctacagcctgagcagcaccctgacactgagcaaggccgactacgagaagcacaaagtgtacgcctgcgaagtgacccaccagggcctttctagccctgtgaccaagagcttcaacaggggcgaatgtggcggcggaggaagcggaggcggaggatctggtggtggcggatctgagattgtgctgacccagtctcctgccacactgtccgtttctccaggcgagagagccacactgagctgtagagccagccagagcgttagctctctgctggcttggtatcagaggaaacctggccagcctcctagactgctgatctacggcgccagcacaagagccacaggcatccctgctagattcagcggatctggaagcggcaccgagttcaccctgaccatctctagcctgcagtccgaggacttcgccgtgtactattgtcagcagtacaacgactggtggaccttcggccagggaacaaaggtcgagatcaaaggcggtggtggcagcggaggttctggatctggcggaggtggaagtgcttctggctctggacaagtgcacctggtgcagtctggcgccgaagtgaaaaagcctggcgcctctgtgaaggtgtcctgcaaggccagcggctacacctttaccgactacttcatccactgggttcgacaggcccctggacagggacttgaatggatgggctggatcaaccccgacgacggcgataccaattacgcccagaaattccacggctgggtcgccatgaccagagacacctctatcaacaccgcctacatggaactgtcccgcctgaagtccaacgacaccgccgtgtattactgcgccagaggcacctttagcctgcggggcttcgattggttcgatccttggggacagggcaccctggtcacagtttctagcggcggatctagcggacaggtccagctggttcaaagcggagctgaagtgaagaaacccggcgctagcgtgaaagtgtcttgcaaagcctctggctacagcttcaccaccaactacgccatgcattgggtccgacaagccccaggccaacggctcgagtggatgggatggattaacgtgggcaacgacaacaccaagtacagccagaaatttcagggccgcgtgaccatcaccagagataccagcgcctccaccgtgaatatggaactgagcagcctgagaagcgaggataccgctgtgtactactgtgcccgcagcaccccattctacgacagacggggcttctacttcctgggctactttcagcattggggccaaggcacactcgtgaccgtttcttctgcttcgaccaagggcccatccgtgtttcctctggctcccagcagcaagtctacaagcggaggaacagccgctctgggctgcctggtcaaggattactttcccgagcctgtgaccgtgtcctggaattctggcgctctgacaagcggcgtgcacacctttccagctgtgctgcaaagcagcggcctgtactctctgagcagcgtggtcacagtgcctagctctagcctgggcacccagacctacatctgcaatgtgaaccacaagcctagcaacaccaaggtggacaagagagtggaacccaagagctgcgataagacccacacatgtcctccatgtcctgctccagaattcgaaggcggcccttctgtgttcctgtttcctccaaagcctaaggacaccctgtacatcaccagagaacctgaagtgacctgcgtggtggtggatgtgtctcacgaggaccccgaagtgaagttcaattggtacgtggacggcgtggaagtgcacaacgccaagaccaagcctagagaggaacagtacaacagcacctacagagtggtgtccgtgctgaccgtgctgcaccaggattggctgaacggcaaagagtacaagtgcaaggtgtccaacaaggccctgcctgcttccatcgagaaaaccatcagcaaggccaagggccagcctagggaaccccaggtttgtacccttcctccaagccgggaagagatgaccaagaaccaggtgtccctgagctgtgccgtgaagggcttctaccccagcgacattgccgtggaatgggagagcaatggccagcctgagaacaactacaagacaacccctcctgtgctggacagcgacggctcattcttcctggtgagcaagctgacagtcgacaagtccagatggcagcagggcaacgtgttcagttgcagcgtgatgcacgaggccctgcacaaccactacacccagaagtccctgagcctgtctcctggaaag

SEQ ID NO: 1029 - protein, 935 aa, synthetic construct; identical to SEQ ID NO: 720

SEQ ID NO: 1030 - protein, 940 aa, synthetic construct; identical to SEQ ID NO: 1026

SEQ ID NO: 1031 - DNA, 2805 bp, synthetic construct; identical to SEQ ID NO: 722
  source 1..2805: mol_type = other DNA

SEQ ID NO: 1032 - DNA, 2820 bp, synthetic construct; identical to SEQ ID NO: 1028
  source 1..2820: mol_type = other DNA

SEQ ID NO: 1033 - protein, 929 aa, synthetic construct
EIVLTQSPGTLSLSPGETATLSCRASQSFSSDLAWYQQKPGQAPRLLIYGASSRATGIPDRFSGSGSGTDFTLTISRLEPADFAVYYCQQYGSSPPVTFGGGTKVEIKRTVAAPSVFIFPPSDEQLKSGTASVVCLLNNFYPREAKVQWKVDNALQSGNSQESVTEQDSKDSTYSLSSTLTLSKADYEKHKVYACEVTHQGLSSPVTKSFNRGECGGGGSGGGGSGGGGSEIVLTQSPGTLSLSPGETATLSCRASQSFSSDLAWYQQKPGQAPRLLIYGASSRATGIPDRFSGSGSGTDFTLTISRLEPADFAVYYCQQYGSSPPVTFGGGTKVEIKGGGGSGGSGSGGGGSASGSGEVQLVESGGGLIQPGGSLRLSCAASGVIVSYNYMNWVRQAPGKGLEWVSVIYSGGSTFYADSVRGRFTISRDNSKNTLYLQMNSLRAEDTAVYYCARDLGPAGAFDIWGLGTMVTVSSGGSSGEVQLVESGGGLIQPGGSLRLSCAASGVIVSYNYMNWVRQAPGKGLEWVSVIYSGGSTFYADSVRGRFTISRDNSKNTLYLQMNSLRAEDTAVYYCARDLGPAGAFDIWGLGTMVTVSSASTKGPSVFPLAPSSKSTSGGTAALGCLVKDYFPEPVTVSWNSGALTSGVHTFPAVLQSSGLYSLSSVVTVPSSSLGTQTYICNVNHKPSNTKVDKRVEPKSCDKTHTCPPCPAPEFEGGPSVFLFPPKPKDTLYITREPEVTCVVVDVSHEDPEVKFNWYVDGVEVHNAKTKPREEQYNSTYRVVSVLTVLHQDWLNGKEYKCKVSNKALPASIEKTISKAKGQPREPQVYTLPPSREEMTKNQVSLTCLVKGFYPSDIAVEWESNGQPENNYKTTPPVLDSDGSFFLYSKLTVDKSRWQQGNVFSCSVMHEALHNHYTQKSLSLSPGK

SEQ ID NO: 1034 - protein, 929 aa, synthetic construct; identical to SEQ ID NO: 1033

SEQ ID NO: 1035 - DNA, 2787 bp, synthetic construct
  source 1..2787: mol_type = other DNA
gagatcgtgctgacacagagccctggcacactgtcactgtctccaggcgaaacagccacactgagctgtagagccagccagagcttcagcagcgacctggcttggtatcagcagaagcctggacaggcccctcggctgttgatctatggcgcctcttctagagccacaggcatccccgatagattcagcggctctggcagcggcaccgatttcaccctgacaatcagcagactggaacccgccgacttcgccgtgtactactgtcagcagtacggcagcagccctcctgtgacatttggcggcggaacaaaggtggaaatcaagcggacagtggccgctcctagcgtgttcatctttccacctagcgacgagcagctgaagtccggcacagcctctgttgtgtgcctgctgaacaacttctaccccagagaagccaaggtgcagtggaaggtggacaacgccctgcagagcggcaatagccaagagagcgtgaccgagcaggacagcaaggactctacctacagcctgagcagcacactgaccctgagcaaggccgactacgagaagcacaaagtgtacgcctgcgaagtgacccaccagggcctttctagccctgtgaccaagagcttcaacaggggcgaatgtggcggaggcggatcaggcggcggaggaagcggtggcggaggatctgaaattgtgctgacccagtctccagggactctgagccttagtcctggcgagacagctaccctgtcttgcagagcctctcagagcttctcctccgatctcgcctggtatcaacaaaagcccgggcaagccccaagactgctgatctacggtgccagcagcagagccaccggaattcccgacaggtttagcggaagcggctccggcactgacttcactctgaccatctctcggctggaacctgctgattttgccgtctattattgccagcagtatggctctagcccaccagtgactttcggcggaggcaccaaggtcgagatcaaaggtggtggtggaagcggcggatctggaagcggaggtggtggatcagcttctggatctggcgaggtgcagctggtggaatcaggtggcggactgattcagcctggcggctctctgagactgtcttgtgctgcttctggcgtgatcgtgtcctacaactacatgaattgggtccgacaggctcccggcaaaggcctggaatgggtgtccgtgatctatagcggcggcagcaccttctacgccgattctgtcagaggccggttcaccatcagccgggacaacagcaagaacaccctgtacctgcagatgaactccctgagagccgaggacaccgctgtgtactattgcgccagagatctgggacctgccggcgcttttgatatctggggcctgggcacaatggtcaccgtgtcaagtggcggatctagcggagaagtccagctggttgagtcaggcggaggcctcattcaaccaggcggaagtctgaggctgagctgtgctgctagcggagtgatcgtcagctacaattatatgaactgggttcgccaagcacctggcaagggccttgagtgggtttcagtcatctactccggcggctctaccttttatgccgactctgtgcggggcagattcaccatctccagagacaactccaagaatacgctctatctccagatgaatagcctgcgcgccgaggatacagcagtgtattactgtgctcgcgacctgggaccagctggcgcattcgacatttggggactgggaactatggttacagtgtccagcgccagcacaaagggcccatctgtgtttccactggctcccagcagcaagtctacctctggtggaacagccgctctgggctgcctggtcaaggattactttcccgagcctgtgaccgtgtcctggaattctggcgctctgacaagcggcgtgcacacatttccagccgtgctgcaaagcagcggcctgtactctctgagcagcgtggtcacagtgcctagctctagcctgggaacccagacctacatctgcaatgtgaaccacaagcctagcaacaccaaagtggacaagagagtggaacccaagagctgcgacaagacccacacctgtcctccatgtccagctccagagtttgaaggcggcccttccgtgttcctgtttcctccaaagcctaaggataccctgtacatcacccgcgagcctgaagtgacctgtgtggtggtcgatgtgtcccacgaggaccccgaagtgaagttcaattggtacgtggacggcgtggaagtgcacaatgccaagaccaagcctagagaggaacagtacaacagcacctacagagtggtgtcagtgctgaccgtcctgcaccaggattggctgaacggcaaagagtacaagtgcaaggtgtccaacaaggccctgcctgccagcatcgagaaaaccatcagcaaggccaagggccagccaagggaaccccaggtttacacactgcctccaagccgggaagagatgaccaagaaccaggtgtccctgacctgcctcgtgaagggcttctacccttccgatatcgccgtggaatgggagagcaatggccagcctgagaacaactacaagacaacccctccagtgctggactccgacggctcattcttcctgtacagcaagctgaccgtggacaagtccagatggcagcagggcaacgtgttcagctgcagcgtgatgcacgaggccctgcacaaccactacacccagaagtccctgagcctgtctcctggcaaa

SEQ ID NO: 1036 - DNA, 2787 bp, synthetic construct; identical to SEQ ID NO: 1035
  source 1..2787: mol_type = other DNA

SEQ ID NO: 1037 - protein, 933 aa, synthetic construct
EIVLTQSPATLSVSPGERATLSCRASQSVSSLLAWYQRKPGQPPRLLIYGASTRATGIPARFSGSGSGTEFTLTISSLQSEDFAVYYCQQYNDWWTFGQGTKVEIKRTVAAPSVFIFPPSDEQLKSGTASVVCLLNNFYPREAKVQWKVDNALQSGNSQESVTEQDSKDSTYSLSSTLTLSKADYEKHKVYACEVTHQGLSSPVTKSFNRGECGGGGSGGGGSGGGGSEIVLTQSPATLSVSPGERATLSCRASQSVSSLLAWYQRKPGQPPRLLIYGASTRATGIPARFSGSGSGTEFTLTISSLQSEDFAVYYCQQYNDWWTFGQGTKVEIKGGGGSGGSGSGGGGSASGSGQVHLVQSGAEVKKPGASVKVSCKASGYTFTDYFIHWVRQAPGQGLEWMGWINPDDGDTNYAQKFHGWVAMTRDTSINTAYMELSRLKSNDTAVYYCARGTFSLRGFDWFDPWGQGTLVTVSSGGSSGQVHLVQSGAEVKKPGASVKVSCKASGYTFTDYFIHWVRQAPGQGLEWMGWINPDDGDTNYAQKFHGWVAMTRDTSINTAYMELSRLKSNDTAVYYCARGTFSLRGFDWFDPWGQGTLVTVSSASTKGPSVFPLAPSSKSTSGGTAALGCLVKDYFPEPVTVSWNSGALTSGVHTFPAVLQSSGLYSLSSVVTVPSSSLGTQTYICNVNHKPSNTKVDKRVEPKSCDKTHTCPPCPAPEFEGGPSVFLFPPKPKDTLYITREPEVTCVVVDVSHEDPEVKFNWYVDGVEVHNAKTKPREEQYNSTYRVVSVLTVLHQDWLNGKEYKCKVSNKALPASIEKTISKAKGQPREPQVYTLPPSREEMTKNQVSLTCLVKGFYPSDIAVEWESNGQPENNYKTTPPVLDSDGSFFLYSKLTVDKSRWQQGNVFSCSVMHEALHNHYTQKSLSLSPGK

SEQ ID NO: 1038 - protein, 933 aa, synthetic construct; identical to SEQ ID NO: 1037

SEQ ID NO: 1039 - DNA, 2799 bp, synthetic construct
  source 1..2799: mol_type = other DNA
gagatcgtgctgacacagtctcccgccacactgagtgtgtctccaggcgaaagagccacactgtcctgtagagccagccagagcgttagctctctgctggcctggtatcagagaaagcctggccagcctcctcggctgctgatctatggcgcttctacaagagccaccggcattcccgccagattttctggctctggcagcggcaccgagttcaccctgacaatctctagcctgcagagcgaggacttcgccgtgtactactgccagcagtacaacgactggtggacctttggccagggcaccaaggtggaaatcaagcggacagtggccgctcctagcgtgttcatctttccacctagcgacgagcagctgaagtctggcacagcctctgtcgtgtgcctgctgaacaacttctaccccagagaagccaaggtgcagtggaaggtggacaacgccctgcagtccggcaatagccaagagagcgtgaccgagcaggacagcaaggactctacctacagcctgagcagcacactgaccctgagcaaggccgactacgagaagcacaaagtgtacgcctgcgaagtgacccaccagggcctttctagccctgtgaccaagagcttcaacagaggcgaatgtggcggcggaggatctggcggaggtggaagtggcggaggcggttctgaaattgtgctgactcagagccccgccactctgtctgttagccctggggaaagagctaccctgagctgcagagcctctcagagcgtgtcaagtctgctcgcttggtatcaacggaagcccggacagccaccaagactgctgatatacggcgccagcactagagccactggaatccctgctagattcagcggcagcggatccggcacagagtttacactgaccatcagctcactgcagtctgaggattttgccgtctattattgtcagcagtataatgattggtggacgttcggacagggaacgaaagtcgagatcaaaggtggtggcggctctggcggatctggtagcggaggcggcggatctgcttctggatctggacaagtgcacctggtgcagtctggcgccgaagtgaagaaaccaggcgccagcgtgaaggtgtcctgcaaggcctctggctacacctttaccgactacttcatccactgggtccgacaggcccctggacaaggacttgaatggatgggctggatcaaccccgacgacggcgataccaattacgcccagaaattccacggctgggtcgccatgaccagagacacctctatcaacaccgcctacatggaactgagccggctgaagtccaacgacaccgctgtgtactattgcgccagaggcacctttagcctgcggggcttcgattggttcgatccttggggccagggaaccctggtcacagttagttctggcggcagctctggccaggtccaccttgttcaaagcggagctgaagtgaaaaagcctggggcctccgtgaaagtgtcttgtaaagccagcggctacacgttcacggattactttattcattgggttcgacaagctcccggccagggcctcgagtggatgggatggattaaccctgatgatggggacacaaactacgcccaaaagtttcatggatgggttgcaatgacccgggacaccagcatcaatactgcttatatggaactgtcccggctcaagagcaatgataccgcagtgtattactgcgctcggggcacattctccctgagaggatttgattggtttgacccctggggacaaggcacactcgtgacagtgtctagcgcctccacaaagggcccaagcgttttcccactggctcccagcagcaagtctacaagcggaggaacagccgctctgggctgcctggtcaaggattacttccctgagcctgtgaccgtgtcctggaattctggcgctctgacaagcggcgtgcacacctttccagctgtgctgcaaagcagcggcctgtactctctgagcagcgttgtgacagtgcccagcagctctctgggcacccagacctacatctgcaatgtgaaccacaagcctagcaacaccaaggtcgacaagagagtggaacccaagagctgcgacaagacccacacatgccctccatgtcctgcacctgagtttgaaggcggcccttccgtgttcctgtttcctccaaagcctaaggacaccctgtacatcacccgcgagcctgaagtgacctgtgtggtggtggatgtgtcccacgaggacccagaagtgaagttcaattggtacgtggacggcgtggaagtgcacaatgccaagaccaagcctagagaggaacagtacaacagcacctacagagtggtgtccgtgctgaccgtgctgcatcaggattggctgaacggcaaagagtacaagtgcaaggtgtccaacaaagccctgcctgccagcatcgagaaaaccatcagcaaggccaagggccagcctagggaaccccaggtttacacactgcctccaagccgggaagagatgaccaagaaccaggtgtccctgacctgcctcgtgaagggcttctaccctagcgacattgccgtcgagtgggagagcaatggacagcccgagaacaactacaagaccacacctcctgtgctggactccgacggctcattcttcctgtacagcaaactgaccgtggacaagagcagatggcagcagggcaacgtgttcagctgcagcgtgatgcacgaagccctgcacaaccactacacccagaaaagcctgtctctgagccccggcaaa

SEQ ID NO: 1040 - DNA, 2799 bp, synthetic construct; identical to SEQ ID NO: 1039
  source 1..2799: mol_type = other DNA

SEQ ID NO: 1041 - protein, 941 aa, synthetic construct
DVQMTQSPSSLSASVGDRVTITCRASQTIVGYLNWYQQQPGRAPKLLIYAASNLQSGVPPRFSGSGSGTDFTLTISDLQPEDFATYYCQQSYLTPPNTFGQGTKLEIKRTVAAPSVFIFPPSDEQLKSGTASVVCLLNNFYPREAKVQWKVDNALQSGNSQESVTEQDSKDSTYSLSSTLTLSKADYEKHKVYACEVTHQGLSSPVTKSFNRGECGGGGSGGGGSGGGGSDVQMTQSPSSLSASVGDRVTITCRASQTIVGYLNWYQQQPGRAPKLLIYAASNLQSGVPPRFSGSGSGTDFTLTISDLQPEDFATYYCQQSYLTPPNTFGQGTKLEIKGGGGSGGSGSGGGGSASGSGQVQLVQSGAEVKKPGSSVKVSCKVSGGTFSDSAVSWVRQAPGQGLEWMGRIIPIFSTIEYAQNFQGRVTITADESTTTVYMELSYLGLEDTAVYYCARDRPIAVEYTGNWFDPWGQGTLVTVSSGGSSGQVQLVQSGAEVKKPGSSVKVSCKVSGGTFSDSAVSWVRQAPGQGLEWMGRIIPIFSTIEYAQNFQGRVTITADESTTTVYMELSYLGLEDTAVYYCARDRPIAVEYTGNWFDPWGQGTLVTVSSASTKGPSVFPLAPSSKSTSGGTAALGCLVKDYFPEPVTVSWNSGALTSGVHTFPAVLQSSGLYSLSSVVTVPSSSLGTQTYICNVNHKPSNTKVDKRVEPKSCDKTHTCPPCPAPEFEGGPSVFLFPPKPKDTLYITREPEVTCVVVDVSHEDPEVKFNWYVDGVEVHNAKTKPREEQYNSTYRVVSVLTVLHQDWLNGKEYKCKVSNKALPASIEKTISKAKGQPREPQVYTLPPSREEMTKNQVSLTCLVKGFYPSDIAVEWESNGQPENNYKTTPPVLDSDGSFFLYSKLTVDKSRWQQGNVFSCSVMHEALHNHYTQKSLSLSPGK

SEQ ID NO: 1042 - protein, 941 aa, synthetic construct; identical to SEQ ID NO: 1041

SEQ ID NO: 1043 - DNA, 2823 bp, synthetic construct
  source 1..2823: mol_type = other DNA
gacgtgcagatgacacagagcccttctagcctgtctgccagcgtgggcgacagagtgaccatcacatgtagagccagccagaccatcgtgggctacctgaactggtatcagcagcagcctggcagagcccctaagctgctgatctacgccgccagcaatctgcagtctggcgtgccacctagattttccggctctggcagcggcaccgatttcaccctgacaatcagcgacctgcagcctgaggacttcgccacctactactgccagcagagctacctgacacctcctaacacctttggccagggcaccaagctggaaatcaagcggacagtggccgctcctagcgtgttcatctttccacctagcgacgagcagctgaagtctggcacagcctctgtcgtgtgcctgctgaacaacttctaccccagagaagccaaggtgcagtggaaggtggacaacgctctgcagtccggcaacagccaagagagcgtgacagagcaggacagcaaggactccacatacagcctgagcagcacactgaccctgagcaaggccgactacgagaagcacaaagtgtacgcctgcgaagtgacccaccagggcctttctagccctgtgaccaagagcttcaacagaggcgaatgtggcggcggaggatctggcggaggtggaagtggcggaggcggttctgatgtccagatgacccagtctcctagcagcctgtcagcctccgtgggagatcgcgtgaccattacctgcagagcctctcagacaattgtgggctatctcaattggtatcaacaacaacccggcagggctcccaaactgctcatctatgccgcttccaacctccagagcggagtgcctccaagattcagcggctctggatccggcacagactttacactgaccatctccgatctgcagcccgaagattttgccacgtattattgccagcagtcctatctgaccccgccaaataccttcggacaggggacaaagctcgagatcaaaggtggtggcggaagcggcggaagtggtagcggaggtggtggatctgcttctggctctggacaggtgcagctggtgcaatctggcgccgaagtgaagaaacctggcagcagcgtgaaggtgtcctgcaaagtgtctggcggcaccttcagcgatagcgccgtgtcttgggttcgacaggctccaggacaaggcctggaatggatgggcagaatcatccccatcttcagcaccatcgagtacgcccagaacttccagggccgcgtgacaatcacagccgatgagagcaccaccaccgtgtacatggaactgtcctacctgggcctcgaggacaccgccgtgtactattgcgccagagacagacctatcgccgtcgagtacaccggcaattggttcgatccttggggccagggaaccctggtcacagttagtagcggcggatctagtggccaggtccagcttgttcagagcggggctgaagtgaaaaagcccggctcctccgtgaaagtgtcttgtaaagtttccggtggcaccttttccgactccgctgtgtcatgggtccgacaagcacctggacagggactcgagtggatgggacgcatcatccctattttctctacgattgaatatgcccagaattttcaaggccgggtcaccattaccgccgacgagtctaccacaacagtctatatggaactgagctatctcggcctggaagatacagccgtgtattactgtgcccgggacagacccattgctgttgagtatactggaaattggtttgacccctggggacaaggcaccctcgtgacagttagctccgcctctacaaagggccccagcgttttcccactggctccaagcagcaagagcacaagcggaggaacagccgctctgggctgtctggtcaaggactactttcccgagcctgtgaccgtgtcctggaatagcggagcactgacaagcggcgtgcacacctttccagctgtgctgcaaagcagcggcctgtactctctgagcagcgttgtgacagtgcccagcagctctctgggcacccagacctacatctgcaatgtgaaccacaagcctagcaacaccaaggtcgacaagagagtggaacccaagtcctgcgacaagacccacacctgtcctccatgtccagctccagagtttgaaggcggcccttccgtgttcctgtttcctccaaagcctaaggacaccctgtacatcacccgcgagcctgaagtgacctgtgtggtggtcgatgtgtcccacgaggacccagaagtgaagtttaattggtacgtggacggcgtggaagtgcacaatgccaagaccaagcctagagaggaacagtacaacagcacctacagagtggtgtccgtgctgaccgtgctgcaccaggattggctgaacggcaaagagtacaagtgcaaggtgtccaacaaggccctgcctgccagcatcgagaaaaccatcagcaaggccaagggccagcctagggaaccccaggtttacacactgccaccaagccgggaagagatgaccaagaaccaggtgtccctgacctgcctcgtgaagggcttctaccctagcgacattgccgtggaatgggagagcaatggccagcctgagaacaactacaagacaacccctcctgtgctggactccgacggctcattcttcctgtacagcaaactgaccgtggacaagagcagatggcagcagggcaacgtgttcagctgcagcgtgatgcacgaggccctgcacaaccactacacccagaaaagcctgtctctgagccccggcaaa

SEQ ID NO: 1044 - DNA, 2823 bp, synthetic construct; identical to SEQ ID NO: 1043
  source 1..2823: mol_type = other DNA

SEQ ID NO: 1045 - protein, 11 aa, synthetic construct
RASQSVSSLLA

SEQ ID NO: 1046 - protein, 7 aa, synthetic construct
GASTRAT

SEQ ID NO: 1047 - protein, 5 aa, synthetic construct
DYFIH

SEQ ID NO: 1048 - protein, 17 aa, synthetic construct
WINPDDGDTNYAQKFHG

SEQ ID NO: 1049 - protein, 13 aa, synthetic construct
GTFSLRGFDWFDP

SEQ ID NO: 1050 - protein, 11 aa, synthetic construct
RASQTIVGYLN

SEQ ID NO: 1051 - protein, 7 aa, synthetic construct
AASNLQS

SEQ ID NO: 1052 - protein, 5 aa, synthetic construct
DSAVS

SEQ ID NO: 1053 - protein, 17 aa, synthetic construct
RIIPIFSTIEYAQNFQG

SEQ ID NO: 1054 - protein, 15 aa, synthetic construct
DRPIAVEYTGNWFDP

SEQ ID NO: 1055 - protein, 11 aa, synthetic construct
RASQSFSSDLA

SEQ ID NO: 1056 - protein, 7 aa, synthetic construct
GASSRAT

SEQ ID NO: 1057 - protein, 5 aa, synthetic construct
YNYMN

SEQ ID NO: 1058 - protein, 16 aa, synthetic construct
VIYSGGSTFYADSVRG

SEQ ID NO: 1059 - protein, 10 aa, synthetic construct
DLGPAGAFDI

SEQ ID NO: 1060 - protein, 11 aa, synthetic construct
QASQDINNFLN

SEQ ID NO: 1061 - protein, 7 aa, synthetic construct
DASNLET

SEQ ID NO: 1062 - protein, 5 aa, synthetic construct
RNYMN

SEQ ID NO: 1063 - protein, 16 aa, synthetic construct
VIYPGGSTFYADSVQG

SEQ ID NO: 1064 - protein, 11 aa, synthetic construct
PIVGGRRGMDV

SEQ ID NO: 1065 - protein, 11 aa, synthetic construct
QASQDISNYLN

SEQ ID NO: 1066 - protein, 9 aa, synthetic construct
QQHDNVPLT

SEQ ID NO: 1067 - protein, 6 aa, synthetic construct
TNYAMH

SEQ ID NO: 1068 - protein, 17 aa, synthetic construct
WINVGNDNTKYSQKFQG

SEQ ID NO: 1069 - protein, 18 aa, synthetic construct
STPFYDRRGFYFLGYFQH

SEQ ID NO: 1070 - protein, 103 aa, synthetic construct
ASTKGPSVFPLAPSSKSTSGGTAALGCLVKDYFPEPVTVSWNSGALTSGVHTFPAVLQSSGLYSLSSVVTVPSSSLGTQTYICNVNHKPSNTKVDKRVEPKSC

SEQ ID NO: 1071 - protein, 103 aa, synthetic construct
ASTKGPSVFPLAPSSKSTSGGTAALGCLVKDYFPEPVTVSWNSGALTSGVHTFPAVLQSSGLYSLSSVVTVPSSSLGTQTYICNVNHKPSNTKVDKKVEPKSC

SEQ ID NO: 1072 - protein, 17 aa, synthetic construct
DKTHTCPPCPAPELLGG

SEQ ID NO: 1073 - protein, 17 aa, synthetic construct
DKTHTCPPCPAPEFEGG

SEQ ID NO: 1074 - protein, 15 aa, synthetic construct
EPKSCDKTHTCPPCP

SEQ ID NO: 1075 - protein, 110 aa, synthetic construct
APELLGGPSVFLFPPKPKDTLMISRTPEVTCVVVDVSHEDPEVKFNWYVDGVEVHNAKTKPREEQYNSTYRVVSVLTVLHQDWLNGKEYKCKVSNKALPAPIEKTISKAK

SEQ ID NO: 1076 - protein, 103 aa, synthetic construct
PSVFLFPPKPKDTLMISRTPEVTCVVVDVSHEDPEVKFNWYVDGVEVHNAKTKPREEQYNSTYRVVSVLTVLHQDWLNGKEYKCKVSNKALPAPIEKTISKAK

SEQ ID NO: 1077 - protein, 103 aa, synthetic construct
PSVFLFPPKPKDTLYITREPEVTCVVVDVSHEDPEVKFNWYVDGVEVHNAKTKPREEQYNSTYRVVSVLTVLHQDWLNGKEYKCKVSNKALPASIEKTISKAK

SEQ ID NO: 1078 - protein, 110 aa, synthetic construct
APEFEGGPSVFLFPPKPKDTLYITREPEVTCVVVDVSHEDPEVKFNWYVDGVEVHNAKTKPREEQYNSTYRVVSVLTVLHQDWLNGKEYKCKVSNKALPASIEKTISKAK

SEQ ID NO: 1079 - protein, 107 aa, synthetic construct
GQPREPQVYTLPPSRDELTKNQVSLTCLVKGFYPSDIAVEWESNGQPENNYKTTPPVLDSDGSFFLYSKLTVDKSRWQQGNVFSCSVMHEALHNHYTQKSLSLSPGK

SEQ ID NO: 1080 - protein, 107 aa, synthetic construct
GQPREPQVYTLPPSREEMTKNQVSLTCLVKGFYPSDIAVEWESNGQPENNYKTTPPVLDSDGSFFLYSKLTVDKSRWQQGNVFSCSVMHEALHNHYTQKSLSLSPGK

SEQ ID NO: 1081 - protein, 107 aa, synthetic construct
GQPREPQVYTLPPSRDELTKNQVSLTCLVKGFYPSDIAVEWESNGQPENNYKTTPPVLDSDGSFFLYSKLTVDKSRWQQGNVFSCSVMHEGLHNHYTQKSLSLSPGK

SEQ ID NO: 1082 - protein, 106 aa, synthetic construct
GQPREPQVYTLPPSRDELTKNQVSLTCLVKGFYPSDIAVEWESNGQPENNYKTTPPVLDSDGSFFLYSKLTVDKSRWQQGNVFSCSVLHEALHSHYTQKSLSLSPG

SEQ ID NO: 1083 - protein, 106 aa, synthetic construct
GQPREPQVYTLPPCRDELTKNQVSLWCLVKGFYPSDIAVEWESNGQPENNYKTTPPVLDSDGSFFLYSKLTVDKSRWQQGNVFSCSVLHEALHSHYTQKSLSLSPG

SEQ ID NO: 1084 - protein, 106 aa, synthetic construct
GQPREPQVYTLPPSRDELTKNQVSLTCLVKGFYPSDIAVEWESNGQPENNYKTTPPVLDSDGSFFLYSKLTVDKSRWQQGNVFSCSVLHEALHAHYTQKSLSLSPG

SEQ ID NO: 1085 - protein, 106 aa, synthetic construct
GQPREPQVCTLPPSRDELTKNQVSLSCAVKGFYPSDIAVEWESNGQPENNYKTTPPVLDSDGSFFLVSKLTVDKSRWQQGNVFSCSVLHEALHSHYTQKSLSLSPG

SEQ ID NO: 1086 - protein, 98 aa, synthetic construct
ASTKGPSVFPLAPCSRSTSESTAALGCLVKDYFPEPVTVSWNSGALTSGVHTFPAVLQSSGLYSLSSVVTVPSSSLGTKTYTCNVDHKPSNTKVDKRV

SEQ ID NO: 1087 - protein, 103 aa, synthetic construct
ASTKGPSVFPLAPCSRSTSESTAALGCLVKDYFPEPVTVSWNSGALTSGVHTFPAVLQSSGLYSLSSVVTVPSSSLGTKTYTCNVDHKPSNTKVDKRVESKYG

SEQ ID NO: 1088 - protein, 98 aa, synthetic construct
ASTKGPSVFPLAPCSRSTSGGTAALGCLVKDYFPEPVTVSWNSGALTSGVHTFPAVLQSSGLYSLSSVVTVPSSSLGTQTYTCNVNHKPSNTKVDKRV

SEQ ID NO: 1089 - protein, 103 aa, synthetic construct
ASTKGPSVFPLAPCSRSTSGGTAALGCLVKDYFPEPVTVSWNSGALTSGVHTFPAVLQSSGLYSLSSVVTVPSSSLGTQTYTCNVNHKPSNTKVDKRVELKTP

SEQ ID NO: 1090 - protein, 98 aa, synthetic construct
ASTKGPSVFPLAPCSRSTSESTAALGCLVKDYFPEPVTVSWNSGALTSGVHTFPAVLQSSGLYSLSSVVTVPSSNFGTQTYTCNVDHKPSNTKVDKTV

SEQ ID NO: 1091 - protein, 103 aa, synthetic construct
ASTKGPSVFPLAPCSRSTSESTAALGCLVKDYFPEPVTVSWNSGALTSGVHTFPAVLQSSGLYSLSSVVTVPSSNFGTQTYTCNVDHKPSNTKVDKTVERKCC

SEQ ID NO: 1092 - protein, 106 aa, synthetic construct
GQPKAAPSVTLFPPSSEELQANKATLVCLVSDFNPGAVTVAWKADGSPVKVGVETTKPSKQSNNKYAASSYLSLTPEQWKSHRSYSCRVTHEGSTVEKTVAPAECS

SEQ ID NO: 1093 - protein, 106 aa, synthetic construct
GQPKANPTVTLFPPSSEELQANKATLVCLISDFYPGAVTVAWKADGSPVKAGVETTKPSKQSNNKYAASSYLSLTPEQWKSHRSYSCQVTHEGSTVEKTVAPTECS

SEQ ID NO: 1094 - protein, 106 aa, synthetic construct
GQPKAAPSVTLFPPSSEELQANKATLVCLISDFYPGAVTVAWKADSSPVKAGVETTTPSKQSNNKYAASSYLSLTPEQWKSHKSYSCQVTHEGSTVEKTVAPTECS

SEQ ID NO: 1095 - protein, 106 aa, synthetic construct
GQPKAAPSVTLFPPSSEELQANKATLVCLISDFYPGAVKVAWKADGSPVNTGVETTTPSKQSNNKYAASSYLSLTPEQWKSHRSYSCQVTHEGSTVEKTVAPAECS

SEQ ID NO: 1096 - protein, 6 aa, synthetic construct
SLRSYY

SEQ ID NO: 1097 - protein, 11 aa, synthetic construct
SSRDSSGNHWV

SEQ ID NO: 1098 - protein, 108 aa, synthetic construct
SSELTQDPAVSVALGQTVRVTCQGDSLRSYYASWYQQKPGQAPVLVIYGKNNRPSGIPDRFSGSSSGNTASLTITGAQAEDEADYYCSSRDSSGNHWVFGGGTELTVL

SEQ ID NO: 1099 - protein, 8 aa, synthetic construct
GGTFNNNA

SEQ ID NO: 1100 - protein, 8 aa, synthetic construct
IIPMFGTA

SEQ ID NO: 1101 - protein, 16 aa, synthetic construct
ARSRDLLLFPHHALSP

SEQ ID NO: 1102 - protein, 123 aa, synthetic construct
QVQLQQSGAEVKKPGSSVRVSCKASGGTFNNNAINWVRQAPGQGLEWMGGIIPMFGTAKYSQNFQGRVAITADESTGTASMELSSLRSEDTAVYYCARSRDLLLFPHHALSPWGRGTMVTVSS

SEQ ID NO: 1103 - protein, 6 aa, synthetic construct
ENIYGA

SEQ ID NO: 1104 - protein, 9 aa, synthetic construct
QNVLNTPLT

SEQ ID NO: 1105 - protein, 107 aa, synthetic construct [sequence omitted]

SEQ ID NO: 1106 - protein, 8 aa, synthetic construct
GYIFSNYW

SEQ ID NO: 1107 - protein, 8 aa, synthetic construct
ILPGSGST

SEQ ID NO: 1108 - protein, 15 aa, synthetic construct
ARYFFGSSPNWYFDV

SEQ ID NO: 1109 - protein, 122 aa, synthetic construct [sequence omitted]

SEQ ID NO: 1110 - protein, 6 aa, synthetic construct
QGIRND

SEQ ID NO: 1111 - protein, 9 aa, synthetic construct
LQDFNYPWT

SEQ ID NO: 1112 - protein, 107 aa, synthetic construct
AIQMTQSPSSLSASVGDRVTITCRASQGIRNDLGWYQQKPGKAPKLLIYAASSLQSGVPSRFAGRGSGTDFTLTISSLQPEDFATYYCLQDFNYPWTFGQGTKVEIK

SEQ ID NO: 1113 - protein, 8 aa, synthetic construct
GDSVSSSY

SEQ ID NO: 1114 - protein, 7 aa, synthetic construct
IYYSGSS

SEQ ID NO: 1115 - protein, 14 aa, synthetic construct
AREGNVDTTMIFDY

SEQ ID NO: 1116 - protein, 120 aa, synthetic construct
QVQLQESGPGLVKPSETLSLTCTVSGDSVSSSYWTWIRQPPGKGLEWIGYIYYSGSSNYNPSLKSRATISVDTSKNQFSLKLSSVTAADTAVYYCAREGNVDTTMIFDYWGQGTLVTVSS

SEQ ID NO: 1117 - protein, 8 aa, synthetic construct
GHIFSNYW

SEQ ID NO: 1118 - protein, 8 aa, synthetic construct
ILPGSGHT

SEQ ID NO: 1119 - protein, 122 aa, synthetic construct [sequence omitted]

SEQ ID NO: 1120 - protein, 10 aa, synthetic construct
QSVDYDGDSY

SEQ ID NO: 1121 - protein, 9 aa, synthetic construct
QQSNEDPYT

SEQ ID NO: 1122 - protein, 111 aa, synthetic construct
DIVLTQSPASLAVSLGQRATISCKASQSVDYDGDSYMKWYQQKPGQPPKLLIYAASNLQSGIPARFSGSGSGTDFTLNIHPVEEEDAATYYCQQSNEDPYTFGGGTKLEIK

SEQ ID NO: 1123 - protein, 8 aa, synthetic construct
GYSFTTFW

SEQ ID NO: 1124 - protein, 8 aa, synthetic construct
IDPSDSES

SEQ ID NO: 1125 - protein, 12 aa, synthetic construct
ARGNDGYYGFAY

SEQ ID NO: 1126 - protein, 119 aa, synthetic construct
QVQLQQSGPQLVRPGTSVKISCKASGYSFTTFWMDWVKQRPGQGLEWIGRIDPSDSESRLDQRFKDRATLTVDKSSSTVYMQLSSPTSEDSAVYYCARGNDGYYGFAYWGQGTLVTVSS

SEQ ID NO: 1127 - protein, 11 aa, synthetic construct
RNIVHINGDTY

SEQ ID NO: 1128 - protein, 9 aa, synthetic construct
FQGSLLPWT

SEQ ID NO: 1129 - protein, 112 aa, synthetic construct
DVLMTQSPLSLPVTPGEPASISCRSSRNIVHINGDTYLEWYLQKPGQSPQLLIYKVSNRFSGVPDRFSGSGSGTDFTLKISRVEAEDVGVYYCFQGSLLPWTFGQGTKVEIK

SEQ ID NO: 1130 - protein, 8 aa, synthetic construct
GFIFSNYG

SEQ ID NO: 1131 - protein, 8 aa, synthetic construct
ISSASTYS

SEQ ID NO: 1132 - protein, 12 aa, synthetic construct
GRHSDGNFAFGY

SEQ ID NO: 1133 - protein, 119 aa, synthetic construct
EVQLVESGGDLVQPGRSLRLSCAASGFIFSNYGMSWVRQAPGKGLEWVATISSASTYSYYPDSVKGRFTISRDNAKNSLYLQMNSLRVEDTALYYCGRHSDGNFAFGYWGQGTLVTVSS

SEQ ID NO: 1134 - protein, 10 aa, synthetic construct
ESVESYGNNF

SEQ ID NO: 1135 - protein, 9 aa, synthetic construct
HQDNEDPPT

SEQ ID NO: 1136 - protein, 111 aa, synthetic construct
DIQMTQSPSSLSASVGDRVTITCRASESVESYGNNFMYWYQQKPGKAPKLLIYLASNLESGVPSRFSGSGSGTDFTLTISSLQPEDFATYYCHQDNEDPPTFGQGTKLEIK

SEQ ID NO: 1137 - protein, 8 aa, synthetic construct
GYTFTNNW

SEQ ID NO: 1138 - protein, 8 aa, synthetic construct
IFPGDDET

SEQ ID NO: 1139 - protein, 13 aa, synthetic construct
GRGGKLRPFALDY

SEQ ID NO: 1140 - protein, 120 aa, synthetic construct
QVQLVQSGAEVKKPGASVKVSCKASGYTFTNNWMQWVRQAPGQGLEWMGAIFPGDDETRYTQKFRGKATITADTSTSTAYMELSSLRSEDTAVYYCGRGGKLRPFALDYWGQGTLVTVSS

SEQ ID NO: 1141 - protein, 6 aa, synthetic construct
EDIINY

SEQ ID NO: 1142 - protein, 9 aa, synthetic construct
QQGYTLPYT

SEQ ID NO: 1143 - protein, 107 aa, synthetic construct [sequence omitted]

SEQ ID NO: 1144 - protein, 8 aa, synthetic construct
GYTFTSYV

SEQ ID NO: 1145 - protein, 8 aa, synthetic construct
INPYNDGT

SEQ ID NO: 1146 - protein, 14 aa, synthetic construct
GREGIRYYGLLGDY

SEQ ID NO: 1147 - protein, 120 aa, synthetic construct
VQLVQSGAEVKKPGASVKVSCKASGYTFTSYVIHWVRQRPGQGLAWMGYINPYNDGTKYNERFKGKVTITSDRSTSTVYMELSSLRSEDTAVYLCGREGIRYYGLLGDYWGQGTLVTVSS

SEQ ID NO: 1148 - protein, 10 aa, synthetic construct
QRVSSSTYSY

SEQ ID NO: 1149 - protein, 9 aa, synthetic construct
QHSWEIPPT

SEQ ID NO: 1150 - protein, 110 aa, synthetic construct
DIVLTQSPATLSVSPGERATISCRASQRVSSSTYSYMHWYQQKPGQPPKLLIKYASNLESGVPARFSGSGSGTDFTLTISSVEPEDFATYYCQHSWEIPPTFGGGTKLEI

SEQ ID NO: 1151 - protein, 8 aa, synthetic construct
GYIFTSYY

SEQ ID NO: 1152 - protein, 8 aa, synthetic construct
INPSNGDT

SEQ ID NO: 1153 - protein, 11 aa, synthetic construct
TRSDGRNDMDS

SEQ ID NO: 1154 - protein, 118 aa, synthetic construct
QVQLVQSGAEVVKPGASVKLSCKASGYIFTSYYMYWVKQAPGQGLEWIGEINPSNGDTNFNEKFKSKATLTVDKSASTAYMELSSLRSEDTAVYYCTRSDGRNDMDSWGQGTLVTVSS

SEQ ID NO: 1155 - protein, 10 aa, synthetic construct
ESVDTFGISF

SEQ ID NO: 1156 - protein, 9 aa, synthetic construct
QQSKEVPFT

SEQ ID NO: 1157 - protein, 111 aa, synthetic construct
EIVLTQSPDFQSVTPKEKVTITCRASESVDTFGISFMNWFQQKPDQSPKLLIHEASNQGSGVPSRFSGSGSGTDFTLTINSLEAEDAATYYCQQSKEVPFTFGGGTKVEIK

SEQ ID NO: 1158 - protein, 8 aa, synthetic construct
GFTFSSSW

SEQ ID NO: 1159 - protein, 8 aa, synthetic construct
IYPGDGDT

SEQ ID NO: 1160 - protein, 14 aa, synthetic construct
ARSGFITTVRDFDY

SEQ ID NO: 1161 - protein, 121 aa, synthetic construct
EVQLVESGGGLVQPGGSLRLSCAASGFTFSSSWMNWVRQAPGKGLEWVGRIYPGDGDTNYNVKFKGRFTISRDDSKNSLYLQMNSLKTEDTAVYYCARSGFITTVRDFDYWGQGTLVTVSS

SEQ ID NO: 1162 - protein, 5 aa, synthetic construct
SGVNY

SEQ ID NO: 1163 - protein, 7 aa, synthetic construct
HQRGSYT

SEQ ID NO: 1164 - protein, 104 aa, synthetic construct
EIVLTQSPAIMSASPGERVTMTCSASSGVNYMHWYQQKPGTSPRRWIYDTSKLASGVPARFSGSGSGTSYSLTISSMEPEDAATYYCHQRGSYTFGGGTKLEIK

SEQ ID NO: 1165 - protein, 8 aa, synthetic construct
GYTFTSNW

SEQ ID NO: 1166 - protein, 8 aa, synthetic construct
IDPSDSYT

SEQ ID NO: 1167 - protein, 13 aa, synthetic construct
ARGSNPYYYAMDY

SEQ ID NO: 1168 - protein, 117 aa, synthetic construct
QVQLVQPGAEVVKPGASVKLSCKTSGYTFTSNWMHWVKQAPGQGLEWIGEIDPSDSYTNYNQNFQGKAKLTVDKSTSTAYMEVSSLRSDDTAVYYCARGSNPYYYAMDYWGQGTSVT

SEQ ID NO: 1169 - protein, 11 aa, synthetic construct
KSLQNVNGNTY

SEQ ID NO: 1170 - protein, 9 aa, synthetic construct
MQHLEYPIT

SEQ ID NO: 1171 - protein, 112 aa, synthetic construct
DIVMTQSPATLSLSPGERATLSCRSSKSLQNVNGNTYLYWFQQKPGQSPQLLIYRMSNLNSGVPDRFSGSGSGTEFTLTISSLEPEDFAVYYCMQHLEYPITFGAGTKLEIK

SEQ ID NO: 1172 - protein, 14 aa, synthetic construct
ARGTYYYGTRVFDY

SEQ ID NO: 1173 - protein, 121 aa, synthetic construct
EVQLVESGGGLVKPGGSLKLSCAASGYTFTSYVMHWVRQAPGKGLEWIGYINPYNDGTKYNEKFQGRVTISSDKSISTAYMELSSLRSEDTAMYYCARGTYYYGTRVFDYWGQGTLVTVSS

SEQ ID NO: 1174 - protein, 11 aa, synthetic construct
KSLLHSNGITY

SEQ ID NO: 1175 - protein, 9 aa, synthetic construct
AQNLELPYT

SEQ ID NO: 1176 - protein, 112 aa, synthetic construct
DIVMTQTPLSLPVTPGEPASISCRSSKSLLHSNGITYLYWYLQKPGQSPQLLIYQMSNLVSGVPDRFSGSGSGTDFTLKISRVEAEDVGVYYCAQNLELPYTFGGGTKVEIK

SEQ ID NO: 1177 - protein, 8 aa, synthetic construct
GYAFSYSW

SEQ ID NO: 1178 - protein, 8 aa, synthetic construct
IFPGDGDT

SEQ ID NO: 1179 - protein, 12 aa, synthetic construct
ARNVFDGYWLVY

SEQ ID NO: 1180 - protein, 119 aa, synthetic construct
QVQLVQSGAEVKKPGSSVKVSCKASGYAFSYSWINWVRQAPGQGLEWMGRIFPGDGDTDYNGKFKGRVTITADKSTSTAYMELSSLRSEDTAVYYCARNVFDGYWLVYWGQGTLVTVSS

SEQ ID NO: 1181 - protein, 5 aa, synthetic construct
SSVSY

SEQ ID NO: 1182 - protein, 9 aa, synthetic construct
QQWSFNPPT

SEQ ID NO: 1183 - protein, 105 aa, synthetic construct
DIQMTQSPSSLSASVGDRVTITCRASSSVSYMHWYQQKPGKAPKPLIYAPSNLASGVPSRFSGSGSGTDFTLTISSLQPEDFATYYCQQWSFNPPTFGQGTKVEI

SEQ ID NO: 1184 - protein, 8 aa, synthetic construct
GYTFTSYN

SEQ ID NO: 1185 - protein, 8 aa, synthetic construct
IYPGNGDT

SEQ ID NO: 1186 - protein, 15 aa, synthetic construct
ARVVYYSNSYWYFDV

SEQ ID NO: 1187 - protein, 122 aa, synthetic construct [sequence omitted]

SEQ ID NO: 1188 - protein, 6 aa, synthetic construct
QSVSSY

SEQ ID NO: 1189 - protein, 9 aa, synthetic construct
QQRSNWPIT

SEQ ID NO: 1190 - protein, 107 aa, synthetic construct
EIVLTQSPATLSLSPGERATLSCRASQSVSSYLAWYQQKPGQAPRLLIYDASNRATGIPARFSGSGSGTDFTLTISSLEPEDFAVYYCQQRSNWPITFGQGTRLEIK

SEQ ID NO: 1191 - protein, 8 aa, synthetic construct
GFTFNDYA

SEQ ID NO: 1192 - protein, 8 aa, synthetic construct
ISWNSGSI

SEQ ID NO: 1193 - protein, 15 aa, synthetic construct
AKDIQYGNYYYGMDV

SEQ ID NO: 1194 - protein, 122 aa, synthetic construct
EVQLVESGGGLVQPGRSLRLSCAASGFTFNDYAMHWVRQAPGKGLEWVSTISWNSGSIGYADSVKGRFTISRDNAKKSLYLQMNSLRAEDTALYYCAKDIQYGNYYYGMDVWGQGTTVTVSS

SEQ ID NO: 1195 - protein, 9 aa, synthetic construct
QQWTSNPPT

SEQ ID NO: 1196 - protein, 106 aa, synthetic construct [sequence omitted]

SEQ ID NO: 1197 - protein, 14 aa, synthetic construct
ARSTYYGGDWYFNV

SEQ ID NO: 1198 - protein, 121 aa, synthetic construct [sequence omitted]

SEQ ID NO: 1199 - protein, 7 aa, synthetic construct
SQHSTYT

SEQ ID NO: 1200 - protein, 7 aa, synthetic construct
LKKDGSH

SEQ ID NO: 1201 - protein, 13 aa, synthetic construct
GMGNKIKEQFVYV

SEQ ID NO: 1202 - protein, 115 aa, synthetic construct
QLVLTQSSSASFSLGASAKLTCTLSSQHSTYTIEWYQQQPLKPPKYVMELKKDGSHSTGDGIPDRFSGSSSGADRYLRISNIQPEDEAIYICGMGNKIKEQFVYVFGGGTKVTVL

SEQ ID NO: 1203 - protein, 8 aa, synthetic construct
GYTFTNYG

SEQ ID NO: 1204 - protein, 8 aa, synthetic construct
INTYTGES

SEQ ID NO: 1205 - protein, 14 aa, synthetic construct
ARWGPHTAPYSMDN

SEQ ID NO: 1206 - protein, 121 aa, synthetic construct
QIQLVQSGPVLKQPGETVKISCKASGYTFTNYGMNWVKQAPGKGLKWMGWINTYTGESTYADDFKGRFAFSLETFVTTACLQINNLKNEDTATYFCARWGPHTAPYSMDNWGQGTSVTVSS

SEQ ID NO: 1207 - protein, 9 aa, synthetic construct
QQWTFNPPT

SEQ ID NO: 1208 - protein, 106 aa, synthetic construct
QIVLSQSPAILSASPGEKVTMTCRASSSVSYMHWYQQKPGSSPKPWIYATSNLASGVPARFSGSGSGTSYSFTISRVEAEDAATYYCQQWTFNPPTFGGGTRLEIK

SEQ ID NO: 1209 - protein, 11 aa, synthetic construct
ARYDYNYAMDY

SEQ ID NO: 1210 - protein, 118 aa, synthetic construct
QAYLQQSGAELVRPGASVKMSCKASGYTFTSYNMHWVKQTPRQGLEWIGGIYPGNGDTSYNQKFKGKATLTVGKSSSTAYMQLSSLTSEDSAVYFCARYDYNYAMDYWGQGTSVTVSS

SEQ ID NO: 1211 - protein, 9 aa, synthetic construct
STGAVTTSN

SEQ ID NO: 1212 - protein, 4 aa, synthetic construct
GGTN

SEQ ID NO: 1213 - protein, 9 aa, synthetic construct
ALWYSNLWV

SEQ ID NO: 1214 - protein, 109 aa, synthetic construct
QAVVTQEPSFSVSPGGTVTLTCRSSTGAVTTSNYANWVQQTPGQAFRGLIGGTNKRAPGVPARFSGSLIGDKAALTITGAQADDESIYFCALWYSNLWVFGGGTKLTVL

SEQ ID NO: 1215 - protein, 8 aa, synthetic construct
SGFTFNTY

SEQ ID NO: 1216 - protein, 10 aa, synthetic construct
RIRSKYNNYA

SEQ ID NO: 1217 - protein, 16 aa, synthetic construct
VRHGNFGNSYVSWFAY

SEQ ID NO: 1218 - protein, 125 aa, synthetic construct
EVKLVESGGGLVQPGGSLRLSCAASGFTFNTYAMNWVRQAPGKGLEWVARIRSKYNNYATYYADSVKDRFTISRDDSKSSLYLQMNNLKTEDTAMYYCVRHGNFGNSYVSWFAYWGQGTLVTVSS

SEQ ID NO: 1219 - protein, 106 aa, synthetic construct
QIVLSQSPAILSASPGERVTLTCRASSSVSYIHWFQQKPGKAPKPLIYATSNLASGVPSRFSGSGSGTDFSLTISRVEPEDFAVYYCQQWTSNPPTFGGGTKVEIK

SEQ ID NO: 1220 - protein, 121 aa, synthetic construct
EVQLVQPGAEVVKPGASVKVSCKASGYTFTSYNMHWVRQAPGRGLEWMGAIYPGNGDTSYNQKFKGRVTMTRDKSTSTVYMELSSLRSEDTAVYYCARSTYYGGDWYFNVWGQGTLVTVSS

SEQ ID NO: 1221 - protein, 11 aa, synthetic construct
QSLANSYGNTF

SEQ ID NO: 1222 - protein, 9 aa, synthetic construct
LQGTHQPYT

SEQ ID NO: 1223 - protein, 112 aa, synthetic construct
DVQVTQSPSSLSASVGDRVTITCRSSQSLANSYGNTFLSWYLHKPGKAPQLLIYGISNRFSGVPDRFSGSGSGTDFTLTISSLQPEDFATYYCLQGTHQPYTFGQGTKVEIK

SEQ ID NO: 1224 - protein, 8 aa, synthetic construct
GYRFTNYW

SEQ ID NO: 1225 - protein, 8 aa, synthetic construct
INPGNNYA

SEQ ID NO: 1226 - protein, 14 aa, synthetic construct
TREGYGNYGAWFAY

SEQ ID NO: 1227 - protein, 119 aa, synthetic construct
QLVQSGAEVKKPGASVKVSCKASGYRFTNYWIHWVRQAPGQGLEWIGGINPGNNYATYRRKFQGRVTMTADTSTSTVYMELSSLRSEDTAVYYCTREGYGNYGAWFAYWGQGTLVTVSS

SEQ ID NO: 1228 - protein, 6 aa, synthetic construct
QDISNY

SEQ ID NO: 1229 - protein, 9 aa, synthetic construct
QQGNTLPWT

SEQ ID NO: 1230 - protein, 107 aa, synthetic construct
DIQMTQTTSSLSASLGDRVTISCRASQDISNYLNWYQQKPDGTVKLLIYYTSILHSGVPSRFSGSGSGTDYSLTISNLEQEDFATYFCQQGNTLPWTFGCGTKLEIK

SEQ ID NO: 1231 - protein, 8 aa, synthetic construct
GFAFSIYD

SEQ ID NO: 1232 - protein, 8 aa, synthetic construct
ISSGGGTT

SEQ ID NO: 1233 - protein, 16 aa, synthetic construct
ARHSGYGTHWGVLFAY

SEQ ID NO: 1234 - protein, 123 aa, synthetic construct
EVQLVESGGGLVKPGGSLKLSCAASGFAFSIYDMSWVRQTPEKCLEWVAYISSGGGTTYYPDTVKGRFTISRDNAKNTLYLQMSSLKSEDTAMYYCARHSGYGTHWGVLFAYWGQGTLVTVSA

SEQ ID NO: 1235 - protein, 5 aa, synthetic construct
SSISY

SEQ ID NO: 1236 - protein, 9 aa, synthetic construct
HQRSTYPLT

SEQ ID NO: 1237 - protein, 106 aa, synthetic construct
DIQMTQSPSTLSASVGDRVTITCSASSSISYMHWYQQKPGKAPKLLIYTTSNLASGVPARFSGSGSGTEFTLTISSLQPDDFATYYCHQRSTYPLTFGQGTKVEVK

SEQ ID NO: 1238 - protein, 8 aa, synthetic construct
GYTFTSYR

SEQ ID NO: 1239 - protein, 8 aa, synthetic construct
INPSTGYT

SEQ ID NO: 1240 - protein, 9 aa, synthetic construct
ARGGGVFDY

SEQ ID NO: 1241 - protein, 116 aa, synthetic construct
QVQLVQSGAEVKKPGSSVKVSCKASGYTFTSYRMHWVRQAPGQGLEWIGYINPSTGYTEYNQKFKDKATITADESTNTAYMELSSLRSEDTAVYYCARGGGVFDYWGQGTLVTVSS

SEQ ID NO: 1242 - protein, 105 aa, synthetic construct
DIQMTQSPSSLSASVGDRVTITCSASSSVSYMNWYQQTPGKAPKRWIYDTSKLASGVPSRFSGSGSGTDYTFTISSLQPEDIATYYCQQWSSNPFTFGQGTKLQI

SEQ ID NO: 1243 - protein, 8 aa, synthetic construct
GYTFTRYT

SEQ ID NO: 1244 - protein, 8 aa, synthetic construct
INPSRGYT

SEQ ID NO: 1245 - protein, 12 aa, synthetic construct
ARYYDDHYCLDY

SEQ ID NO: 1246 - protein, 119 aa, synthetic construct [sequence omitted]

SEQ ID NO: 1247 - protein, 10 aa, synthetic construct
QSVDFDGDSY

SEQ ID NO: 1248 - protein, 9 aa, synthetic construct
QQSNEDPWT

SEQ ID NO: 1249 - protein, 111 aa, synthetic construct
DIVLTQSPASLAVSLGQRATISCKASQSVDFDGDSYMNWYQQKPGQPPKVLIYAASNLESGIPARFSGSGSGTDFTLNIHPVEEEDAATYYCQQSNEDPWTFGGGTKLEIK

SEQ ID NO: 1250 - protein, 8 aa, synthetic construct
GYTFTDYY

SEQ ID NO: 1251 - protein, 8 aa, synthetic construct
IYPGSGNT

SEQ ID NO: 1252 - protein, 10 aa, synthetic construct
ANYGNYWFAY

SEQ ID NO: 1253 - protein, 117 aa, synthetic construct
QIQLQQSGPEVVKPGASVKISCKASGYTFTDYYITWVKQKPGQGLEWIGWIYPGSGNTKYNEKFKGKATLTVDTSSSTAFMQLSSLTSEDTAVYFCANYGNYWFAYWGQGTQVTVSA

SEQ ID NO: 1254 - protein, 10 aa, synthetic construct
ESLDNYGIRF

SEQ ID NO: 1255 - protein, 9 aa, synthetic construct
QQTKEVPWS

SEQ ID NO: 1256 - protein, 111 aa, synthetic construct [sequence omitted]

SEQ ID NO: 1257 - protein, 8 aa, synthetic construct
GYTITDSN

SEQ ID NO: 1258 - protein, 8 aa, synthetic construct
IYPYNGGT

SEQ ID NO: 1259 - protein, 9 aa, synthetic construct
VNGNPWLAY

SEQ ID NO: 1260 - protein, 116 aa, synthetic construct [sequence omitted]

SEQ ID NO: 1261 - protein, 6 aa, synthetic construct
QDVSTV

SEQ ID NO: 1262 - protein, 9 aa, synthetic construct
QQHYSPPYT

SEQ ID NO: 1263 - protein, 107 aa, synthetic construct [sequence omitted]

SEQ ID NO: 1264 - protein, 8 aa, synthetic construct
GYTFTDYW

SEQ ID NO: 1265 - protein, 120 aa, synthetic construct [sequence omitted]

SEQ ID NO: 1266 - protein, 12 aa, synthetic construct
QSLLYSTNQKNY

SEQ ID NO: 1267 - protein, 8 aa, synthetic construct
QQYYSYRT

SEQ ID NO: 1268 - protein, 112 aa, synthetic construct
DIVMTQSPDSLAVSLGERVTMNCKSSQSLLYSTNQKNYLAWYQQKPGQSPKLLIYWASTRESGVPDRFSGSGSGTDFTLTISSVQAEDVAVYYCQQYYSYRTFGGGTKLEIK

SEQ ID NO: 1269 - protein, 15 aa, synthetic construct
AREKDNYATGAWFAY

SEQ ID NO: 1270 - protein, 122 aa, synthetic construct
QVQLQQSGPEVVKPGASVKMSCKASGYTFTSYVIHWVRQKPGQGLDWIGYINPYNDGTDYDEKFKGKATLTSDTSTSTAYMELSSLRSEDTAVYYCAREKDNYATGAWFAYWGQGTLVTVSS

SEQ ID NO: 1271 - protein, 6 aa, synthetic construct
QNIDKY

SEQ ID NO: 1272 - protein, 9 aa, synthetic construct
LQHISRPRT

SEQ ID NO: 1273 - protein, 107 aa, synthetic construct
DIQMTQSPSSLSASVGDRVTITCKASQNIDKYLNWYQQKPGKAPKLLIYNTNNLQTGVPSRFSGSGSGTDFTFTISSLQPEDIATYYCLQHISRPRTFGQGTKVEIK

SEQ ID NO: 1274 - protein, 8 aa, synthetic construct
GFTFTDFY

SEQ ID NO: 1275 - protein, 9 aa, synthetic construct
IRDKAKGYT

SEQ ID NO: 1276 - protein, 12 aa, synthetic construct
AREGHTAAPFDY

SEQ ID NO: 1277 - protein, 121 aa, synthetic construct
QVQLQESGPGLVRPSQTLSLTCTVSGFTFTDFYMNWVRQPPGRGLEWIGFIRDKAKGYTTEYNPSVKGRVTMLVDTSKNQFSLRLSSVTAADTAVYYCAREGHTAAPFDYWGQGSLVTVSS

SEQ ID NO: 1278 - protein, 6 aa, synthetic construct
RDIRSY

SEQ ID NO: 1279 - protein, 13 aa, synthetic construct
LQHGESPFTLGSG

SEQ ID NO: 1280 - protein, 107 aa, synthetic construct
DIQMTQSPSSLSASVGDRVTITCKASRDIRSYLTWYQQKPGKAPKTLIYYATSLADGVPSRFSGSGSGQDYSLTISSLESDDTATYYCLQHGESPFTLGSGTKLEIK

SEQ ID NO: 1281 - protein, 8 aa, synthetic construct
GFKFSRYA

SEQ ID NO: 1282 - protein, 8 aa, synthetic construct
ISSGGSYI

SEQ ID NO: 1283 - protein, 12 aa, synthetic construct
ARRDYDLDYFDS

SEQ ID NO: 1284 - protein, 119 aa, synthetic construct
EVQLVESGGGLVKPGGSLKLSCAASGFKFSRYAMSWVRQAPGKRLEWVATISSGGSYIYYPDSVKGRFTISRDNVKNTLYLQMSSLRSEDTAMYYCARRDYDLDYFDSWGQGTLVTVSS

SEQ ID NO: 1285 - protein, 10 aa, synthetic construct
QSVDYEGDSF

SEQ ID NO: 1286 - protein, 9 aa, synthetic construct
QQSNEDPLT

SEQ ID NO: 1287 - protein, 111 aa, synthetic construct [sequence omitted]

SEQ ID NO: 1288 - protein, 8 aa, synthetic construct
GYTFSSYW

SEQ ID NO: 1289 - protein, 8 aa, synthetic construct
ILPGGGDT

SEQ ID NO: 1290 - protein, 10 aa, synthetic construct
TRRVPIRLDY

SEQ ID NO: 1291 - protein, 117 aa, synthetic construct [sequence omitted]

SEQ ID NO: 1292 - protein, 12 aa, synthetic construct
QSLLNSGNQKNY

SEQ ID NO: 1293 - protein, 9 aa, synthetic construct
QNDYSYPFT

SEQ ID NO: 1294 - protein, 113 aa, synthetic construct
DIVMTQSPSSLTVTAGEKVTMSCKSSQSLLNSGNQKNYLTWYQQKPGQPPKLLIYWASTRESGVPDRFTGSGSGTDFTLTISSVQAEDLAVYYCQNDYSYPFTFGSGTKLEIK

SEQ ID NO: 1295 - protein, 8 aa, synthetic construct
GYTFTSYW

SEQ ID NO: 1296 - protein, 8 aa, synthetic construct
IYPSDSYT

SEQ ID NO: 1297 - protein, 11 aa, synthetic construct
TRSWRGNSFDY

SEQ ID NO: 1298 - protein, 118 aa, synthetic construct
QVQLQQPGAELVRPGASVKLSCKASGYTFTSYWINWVKQRPGQGLEWIGNIYPSDSYTNYNQKFKDKATLTVDKSSSTAYMQLSSPTSEDSAVYYCTRSWRGNSFDYWGQGTTLTVSS

SEQ ID NO: 1299 - protein, 6 aa, synthetic construct
QSVSND

SEQ ID NO: 1300 - protein, 6 aa, synthetic construct
QQDYSS

SEQ ID NO: 1301 - protein, 103 aa, synthetic construct
IVMTQTPATLSVSAGERVTITCKASQSVSNDVTWYQQKPGQAPRLLIYSASNRYSGVPARFSGSGYGTEFTFTISSVQSEDFAVYFCQQDYSSFGQGTKLEIK

SEQ ID NO: 1302 - protein, 8 aa, synthetic construct
GFSVTNYG

SEQ ID NO: 1303 - protein, 7 aa, synthetic construct
IWAGGIT

SEQ ID NO: 1304 - protein, 13 aa, synthetic construct
ASRGGHYGYALDY

SEQ ID NO: 1305 - protein, 119 aa, synthetic construct
QVQLVESGPGVVQPGRSLRISCAVSGFSVTNYGVHWVRQPPGKGLEWLGVIWAGGITNYNSAFMSRLTISKDNSKNTVYLQMNSLRAEDTAMYYCASRGGHYGYALDYWGQGTLVTVSS

SEQ ID NO: 1306 - protein, 6 aa, synthetic construct
QGISSR

SEQ ID NO: 1307 - protein, 9 aa, synthetic construct
QQYNSYPYT

SEQ ID NO: 1308 - protein, 107 aa, synthetic construct
DIQMTQSPPSLSASAGDRVTITCRASQGISSRLAWYQQKPEKAPKSLIYAASSLQSGVPSRFSGSGSGTDFTLTISSLQPEDFATYYCQQYNSYPYTFGQGTKLEIK

SEQ ID NO: 1309 - protein, 8 aa, synthetic construct
GFTFSNYA

SEQ ID NO: 1310 - protein, 8 aa, synthetic construct
ISGSGDYT

SEQ ID NO: 1311 - protein, 11 aa, synthetic construct
ARSPWGYYLDS

SEQ ID NO: 1312 - protein, 118 aa, synthetic construct
EVQLLESGGGLVQPGGSLRLSCAASGFTFSNYAMSWVRQAPGKGLEWVSSISGSGDYTYYTDSVKGRFTISRDNSKNTLYLQMNSLRAEDTAVYYCARSPWGYYLDSWGQGTLVTVSS

SEQ ID NO: 1313 - protein, 6 aa, synthetic construct
EDIYDN

SEQ ID NO: 1314 - protein, 106 aa, synthetic construct
IQMTQSPSSLSASVGDRVTITCLASEDIYDNLAWYQQKPGKAPKLLIYYASSLQDGVPSRFSGSGSGTDYTLTISSLQPEDFATYYCLQDSEYPWTFGGGTKVEIK

SEQ ID NO: 1315 - protein, 10 aa, synthetic construct
GFSLTTYGMG

SEQ ID NO: 1316 - protein, 7 aa, synthetic construct
IWWDDDK

SEQ ID NO: 1317 - protein, 18 aa, synthetic construct
ARIGPIKYPTAPYRYFDF

SEQ ID NO: 1318 - protein, 125 aa, synthetic construct
VTLKESGPALVKPTQTLTLTCTFSGFSLTTYGMGVGWIRQPPGKALEWLANIWWDDDKYYNPSLKNRLTISKDTSKNQVVLTMTNMDPVDTATYYCARIGPIKYPTAPYRYFDFWGQGTMVTVSS

SEQ ID NO: 1319 - protein, 6 aa, synthetic construct
QSINSY

SEQ ID NO: 1320 - protein, 9 aa, synthetic construct
QQYYSTPFT

SEQ ID NO: 1321 - protein, 107 aa, synthetic construct
DIQMTQSPSSLSASVGDRVTITCRASQSINSYLDWYQQKPGKAPKLLIYAASSLQSGVPSRFSGSGSGTDFTLTISSLQPEDFATYYCQQYYSTPFTFGPGTKVEIK

SEQ ID NO: 1322 - protein, 8 aa, synthetic construct
GFTFSSYG

SEQ ID NO: 1323 - protein, 8 aa, synthetic construct
IWYDGSNK

SEQ ID NO: 1324 - protein, 13 aa, synthetic construct
ARDPRGATLYYYY

SEQ ID NO: 1325 - protein, 125 aa, synthetic construct
QVQLVESGGGVVQPGRSLRLSCAASGFTFSSYGMHWVRQAPGKGLEWVAVIWYDGSNKYYADSVKGRFTISRDNSKNTLYLQMNSLRAEDTAVYYCARDPRGATLYYYYYGMDVWGQGTTVTVSS

SEQ ID NO: 1326 - protein, 7 aa, synthetic construct
QSVGSSY

SEQ ID NO: 1327 - protein, 9 aa, synthetic construct
QQYGSSPWT

SEQ ID NO: 1328 - protein, 108 aa, synthetic construct
EIVLTQSPGTLSLSPGERATLSCRASQSVGSSYLAWYQQKPGQAPRLLIYGAFSRATGIPDRFSGSGSGTDFTLTISRLEPEDFAVYYCQQYGSSPWTFGQGTKVEIK

SEQ ID NO: 1329 - protein, 8 aa, synthetic construct
GFTFSSYT

SEQ ID NO: 1330 - protein, 8 aa, synthetic construct
ISYDGNNK

SEQ ID NO: 1331 - protein, 11 aa, synthetic construct
ARTGWLGPFDY

SEQ ID NO: 1332 - protein, 118 aa, synthetic construct
QVQLVESGGGVVQPGRSLRLSCAASGFTFSSYTMHWVRQAPGKGLEWVTFISYDGNNKYYADSVKGRFTISRDNSKNTLYLQMNSLRAEDTAIYYCARTGWLGPFDYWGQGTLVTVSS

SEQ ID NO: 1333 - protein, 9 aa, synthetic construct
QHFDHLPLA

SEQ ID NO: 1334 - protein, 107 aa, synthetic construct [sequence omitted]

SEQ ID NO: 1335 - protein, 10 aa, synthetic construct
GGSVSSGDYY

SEQ ID NO: 1336 - protein, 7 aa, synthetic construct
IYYSGNT

SEQ ID NO: 1337 - protein, 11 aa, synthetic construct
VRDRVTGAFDI

SEQ ID NO: 1338 - protein, 119 aa, synthetic construct [sequence omitted]

SEQ ID NO: 1339 - protein, 6 aa, synthetic construct
QSIGTN

SEQ ID NO: 1340 - protein, 9 aa, synthetic construct
QQNNNWPTT

SEQ ID NO: 1341 - protein, 107 aa, synthetic construct
DILLTQSPVILSVSPGERVSFSCRASQSIGTNIHWYQQRTNGSPRLLIKYASESISGIPSRFSGSGSGTDFTLSINSVESEDIADYYCQQNNNWPTTFGAGTKLELK

SEQ ID NO: 1342 - protein, 8 aa, synthetic construct
GFSLTNYG

SEQ ID NO: 1343 - protein, 7 aa, synthetic construct
IWSGGNT

SEQ ID NO: 1344 - protein, 13 aa, synthetic construct
ARALTYYDYEFAY

SEQ ID NO: 1345 - protein, 119 aa, synthetic construct
QVQLKQSGPGLVQPSQSLSITCTVSGFSLTNYGVHWVRQSPGKGLEWLGVIWSGGNTDYNTPFTSRLSINKDNSKSQVFFKMNSLQSNDTAIYYCARALTYYDYEFAYWGQGTLVTVSA

SEQ ID NO: 1346 - protein, 9 aa, synthetic construct
HQYGSTPLT

SEQ ID NO: 1347 - protein, 107 aa, synthetic construct [sequence omitted]

SEQ ID NO: 1348 - protein, 10 aa, synthetic construct
GGSISSGDYY

SEQ ID NO: 1349 - protein, 7 aa, synthetic construct
IYYSGST

SEQ ID NO: 1350 - protein, 13 aa, synthetic construct
ARVSIFGVGTFDY

SEQ ID NO: 1351 - protein, 121 aa, synthetic construct [sequence omitted]

SEQ ID NO: 1352 - protein, 11 aa, synthetic construct
QNIVHSNGNTY

SEQ ID NO: 1353 - protein, 9 aa, synthetic construct
FQYSHVPWT

SEQ ID NO: 1354 - protein, 111 aa, synthetic construct
DIQMTQSPSSLSASVGDRVTITCRSSQNIVHSNGNTYLDWYQQTPGKAPKLLIYKVSNRFSGVPSRFSGSGSGTDFTFTISSLQPEDIATYYCFQYSHVPWTFGQGTKLQI

SEQ ID NO: 1355 - protein, 8 aa, synthetic construct
GYTFTNYY

SEQ ID NO: 1356 - protein, 8 aa, synthetic construct
INPTSGGS

SEQ ID NO: 1357 - protein, 16 aa, synthetic construct
ARQGLWFDSDGRGFDF

SEQ ID NO: 1358 - protein, 123 aa, synthetic construct
QVQLQQSGAEVKKPGSSVKVSCKASGYTFTNYYIYWVRQAPGQGLEWIGGINPTSGGSNFNEKFKTRVTITVDESTNTAYMELSSLRSEDTAFYFCARQGLWFDSDGRGFDFWGQGSTVTVSS

SEQ ID NO: 1359 - protein, 6 aa, synthetic construct
QGISSA

SEQ ID NO: 1360 - protein, 8 aa, synthetic construct
QQFNDYFT

SEQ ID NO: 1361 - protein, 106 aa, synthetic construct
AIQLTQSPSSLSASVGDRVTITCRASQGISSALVWYQQKPGKAPKLLIYDASSLESGVPSRFSGSGSGTDFTLTISSLQPEDFATYYCQQFNDYFTFGPGTKVDIK

SEQ ID NO: 1362 - protein, 8 aa, synthetic construct
GYTFTNHY

SEQ ID NO: 1363 - protein, 8 aa, synthetic construct
INPISGST

SEQ ID NO: 1364 - protein, 10 aa, synthetic construct
ARDIVDAFDF

SEQ ID NO: 1365 - protein, 117 aa, synthetic construct
QVQLVQSGAEVKKPGASVKVSCKASGYTFTNHYMHWVRQAPGQGLEWMGIINPISGSTSNAQKFQGRVTMTRDTSTSTVYMELSSLRSEDTAVYYCARDIVDAFDFWGQGTMVTVSS

SEQ ID NO: 1366 - protein, 11 aa, synthetic construct
QSLVHRNGNTY

SEQ ID NO: 1367 - protein, 10 aa, synthetic construct
SQSTHVPPLT

SEQ ID NO: 1368 - protein, 113 aa, synthetic construct [sequence omitted]

SEQ ID NO: 1369 - protein, 8 aa, synthetic construct
GSSFTGYN

SEQ ID NO: 1370 - protein, 8 aa, synthetic construct
IDPYYGGT

SEQ ID NO: 1371 - protein, 6 aa, synthetic construct
VSGMEY

SEQ ID NO: 1372 - protein, 113 aa, synthetic construct [sequence omitted]

SEQ ID NO: 1373 - protein, 6 aa, synthetic construct
QDVNTA

SEQ ID NO: 1374 - protein, 9 aa, synthetic construct
QQHYTTPPT

SEQ ID NO: 1375 - protein, 106 aa, synthetic construct
DIVMTQSHKFMSTSVGDRVSITCKASQDVNTAVAWYQQKPGHSPKLLIYSASFRYTGVPDRFTGSRSGTDFTFTISSVQAEDLAVYYCQQHYTTPPTFGGGTKVEI

SEQ ID NO: 1376 - protein, 8 aa, synthetic construct
GFNIKDTY

SEQ ID NO: 1377 - protein, 8 aa, synthetic construct
IYPTNGYT

SEQ ID NO: 1378 - protein, 13 aa, synthetic construct
SRWGGDGFYAMDY

SEQ ID NO: 1379 - protein, 120 aa, synthetic construct
QVQLQQSGPELVKPGASLKLSCTASGFNIKDTYIHWVKQRPEQGLEWIGRIYPTNGYTRYDPKFQDKATITADTSSNTAYLQVSRLTSEDTAVYYCSRWGGDGFYAMDYWGQGASVTVSS

SEQ ID NO: 1380 - protein, 107 aa, synthetic construct [sequence omitted]

SEQ ID NO: 1381 - protein, 120 aa, synthetic construct [sequence omitted]

SEQ ID NO: 1382 - protein, 6 aa, synthetic construct
QDVSIG

SEQ ID NO: 1383 - protein, 9 aa, synthetic construct
QQYYIYPYT

SEQ ID NO: 1384 - protein, 107 aa, synthetic construct [sequence omitted]

SEQ ID NO: 1385 - protein, 8 aa, synthetic construct
GFTFTDYT

SEQ ID NO: 1386 - protein, 8 aa, synthetic construct
VNPNSGGS

SEQ ID NO: 1387 - protein, 12 aa, synthetic construct
ARNLGPSFYFDY

SEQ ID NO: 1388 - protein, 119 aa, synthetic construct [sequence omitted]

SEQ ID NO: 1389 - protein, 10 aa, synthetic construct
QQRSKWPPWT

SEQ ID NO: 1390 - protein, 108 aa, synthetic construct
EIVLTQSPATLSLSPGERATLSCRASQSVSSYLAWYQQKPGQAPRLLIYDASKRATGIPARFSGSGSGTDFTLTISSLEPEDFAVYYCQQRSKWPPWTFGQGTKVESK

SEQ ID NO: 1391 - protein, 8 aa, synthetic construct
IWFDGSST

SEQ ID NO: 1392 - protein, 11 aa, synthetic construct
ARELGRRYFDL

SEQ ID NO: 1393 - protein, 118 aa, synthetic construct
QVELVESGGGVVQPGRSQRLSCAASGFTFSSYGMHWVRQAPGKGLEWVAIIWFDGSSTYYADSVRGRFTISRDNSKNTLYLQMNSLRAEDTAVYFCARELGRRYFDLWGRGTLVSVSS

SEQ ID NO: 1394 - protein, 6 aa, synthetic construct
QSIGSS

SEQ ID NO: 1395 - protein, 9 aa, synthetic construct
HQSSSLPFT

SEQ ID NO: 1396 - protein, 107 aa, synthetic construct [sequence omitted]

SEQ ID NO: 1397 - protein, 8 aa, synthetic construct
GFTFSVYG

SEQ ID NO: 1398 - protein, 8 aa, synthetic construct
IWYDGDNQ

SEQ ID NO: 1399 - protein, 11 aa, synthetic construct
ARDLRTGPFDY

SEQ ID NO: 1400 - protein, 118 aa, synthetic construct [sequence omitted]

SEQ ID NO: 1401 - protein, 6 aa, synthetic construct
QGISSW

SEQ ID NO: 1402 - protein, 9 aa, synthetic construct
QQYNIYPYT

SEQ ID NO: 1403 - protein, 107 aa, synthetic construct
DIQMTQSPSSLSASVGDRVTITCRASQGISSWLAWYQQKPEKAPKSLIYAASSLQSGVPSRFSGSGSGTDFTLTISSLQPEDFATYYCQQYNIYPYTFGQGTKLEIK

SEQ ID NO: 1404 - protein, 8 aa, synthetic construct
GYSFTTYW

SEQ ID NO: 1405 - protein, 8 aa, synthetic construct
MSPVDSDI

SEQ ID NO: 1406 - protein, 12 aa, synthetic construct
ARRRPGQGYFDF

SEQ ID NO: 1407 - protein, 119 aa, synthetic construct
EVQLVQSGAEVKKPGESLKISCKGSGYSFTTYWLGWVRQMPGKGLDWIGIMSPVDSDIRYSPSFQGQVTMSVDKSITTAYLQWNSLKASDTAMYYCARRRPGQGYFDFWGQGTLVTVSS

SEQ ID NO: 1408 - protein, 6 aa, synthetic construct
IIGSKL

SEQ ID NO: 1409 - protein, 11 aa, synthetic construct
QVWDTGSDPVV

SEQ ID NO: 1410 - protein, 108 aa, synthetic construct
SYVLTQPPSVSVAPGKTARITCGGNIIGSKLVHWYQQKPGQAPVLVIYDDGDRPSGIPERFSGSNSGNTATLTISRVEAGDEADYYCQVWDTGSDPVVFGGGTKLTVL

SEQ ID NO: 1411 - protein, 8 aa, synthetic construct
ISANNGDT

SEQ ID NO: 1412 - protein, 15 aa, synthetic construct
ARDSSSSWARWFFDL

SEQ ID NO: 1413 - protein, 122 aa, synthetic construct
QVQLVQSGAEVKKPGASVKVSCKASGYTFTNYGLSWVRQAPGQGLEWMGWISANNGDTNYGQEFQGRVTMTTDTSTSTAYMELRSLRSDDTAVYYCARDSSSSWARWFFDLWGRGTLVTVSS

SEQ ID NO: 1414 - protein, 6 aa, synthetic construct
QSVSSN

SEQ ID NO: 1415 - protein, 9 aa, synthetic construct
QQYDNWPLT

SEQ ID NO: 1416 - protein, 107 aa, synthetic construct
EIVMTQSPATLSVSPGERATLSCRASQSVSSNLAWFQQKPGQAPRPLIYDASTRATGVPARFSGSGSGTDFTLTISSLQSEDFAVYYCQQYDNWPLTFGGGTKVEIK

SEQ ID NO: 1417 - protein, 8 aa, synthetic construct
GYTFTRYG

SEQ ID NO: 1418 - protein, 8 aa, synthetic construct
ISTYSGNT

SEQ ID NO: 1419 - protein, 9 aa, synthetic construct
ARRQLYFDY

SEQ ID NO: 1420 - protein, 116 aa, synthetic construct
QVQLVQSGAEVKKPGASVKVSCKASGYTFTRYGISWVRQAPGQGLEWMGWISTYSGNTNYAQKLQGRVTMTTDTSTSTAYMELRSLRSDDTAVYYCARRQLYFDYWGQGTLVTVSS

SEQ ID NO: 1421 - protein, 11 aa, synthetic construct
RSLVHSRGNTY

SEQ ID NO: 1422 - protein, 9 aa, synthetic construct
SQSTHLPFT

SEQ ID NO: 1423 - protein, 112 aa, synthetic construct
DIVMTQTPLSLSVTPGQPASISCRSSRSLVHSRGNTYLHWYLQKPGQSPQLLIYKVSNRFIGVPDRFSGSGSGTDFTLKISRVEAEDVGVYYCSQSTHLPFTFGQGTKLEIK

SEQ ID NO: 1424 - protein, 8 aa, synthetic construct
GYSFTDYH

SEQ ID NO: 1425 - protein, 8 aa, synthetic construct
INPMYGTT

SEQ ID NO: 1426 - protein, 12 aa, synthetic construct
ARYDYFTGTGVY

SEQ ID NO: 1427 - protein, 119 aa, synthetic construct
QVQLVQSGAEVKKPGSSVKVSCKASGYSFTDYHIHWVRQAPGQGLEWMGVINPMYGTTDYNQRFKGRVTITADESTSTAYMELSSLRSEDTAVYYCARYDYFTGTGVYWGQGTLVTVSS

SEQ ID NO: 1428 - protein, 7 aa, synthetic construct
QSVSSSY

SEQ ID NO: 1429 - protein, 9 aa, synthetic construct
QQYSYSPVT

SEQ ID NO: 1430 - protein, 108 aa, synthetic construct
EIVLTQSPGTLSLSPGERATLSCRASQSVSSSYLAWYQQKPGQAPRLLIYDASSRATGIPDRFSGSGSGTDFTLTISRLEPEDFAVYYCQQYSYSPVTFGQGTKVEIK

SEQ ID NO: 1431 - protein, 8 aa, synthetic construct
GGTFATSP

SEQ ID NO: 1432 - protein, 7 aa, synthetic construct
ISPSGGD

SEQ ID NO: 1433 - protein, 19 aa, synthetic construct
CAVRRRFDGTSYYTGDYDS

SEQ ID NO: 1434 - protein, 125 aa, synthetic construct
QVQLVQSGGGLVQAGGSLRLSCAASGGTFATSPMGWLRQAPGKGTEFVAAISPSGGDRIYADSVKGRFTISRDNAGYFIYLQMNSLKPEDTAVYYCAVRRRFDGTSYYTGDYDSWGQGTLVTVSS

SEQ ID NO: 1435 - protein, 9 aa, synthetic construct
QQYGSSPCT

SEQ ID NO: 1436 - protein, 108 aa, synthetic construct [sequence omitted]

SEQ ID NO: 1437 - protein, 8 aa, synthetic construct
GFTFSNYW

SEQ ID NO: 1438 - protein, 8 aa, synthetic construct
INQDGSEK

SEQ ID NO: 1439 - protein, 20 aa, synthetic construct [sequence omitted]

SEQ ID NO: 1440 - protein, 127 aa, synthetic construct [sequence omitted]

SEQ ID NO: 1441 - protein, 6 aa, synthetic construct
ESVRTL

SEQ ID NO: 1442 - protein, 9 aa, synthetic construct
QQTWSDPWT

SEQ ID NO: 1443 - protein, 107 aa, synthetic construct
AIQLTQSPSSLSASVGDRVTITCRADESVRTLMHWYQQKPGKAPKLLIYLVSNSEIGVPDRFSGSGSGTDFRLTISSLQPEDFATYYCQQTWSDPWTFGQGTKVEIK

SEQ ID NO: 1444 - protein, 8 aa, synthetic construct
GFTFSDYN

SEQ ID NO: 1445 - protein, 8 aa, synthetic construct
ITYEGRNT

SEQ ID NO: 1446 - protein, 18 aa, synthetic construct
ASPPQYYEGSIYRLWFAH

SEQ ID NO: 1447 - protein, 125 aa, synthetic construct
EVQLVESGGGLVQPGGSLRLSCAASGFTFSDYNMAWVRQAPGKGLEWVATITYEGRNTYYRDSVKGRFTISRDNAKNSLYLQMNSLRAEDTAVYYCASPPQYYEGSIYRLWFAHWGQGTLVTVSS

SEQ ID NO: 1448 - protein, 9 aa, synthetic construct
SSNIGSGYD

SEQ ID NO: 1449 - protein, 11 aa, synthetic construct
ASWTDGLSLVV

SEQ ID NO: 1450 - protein, 111 aa, synthetic construct
QSVLTQPPSVSGAPGQRVTISCTGSSSNIGSGYDVHWYQQLPGTAPKLLIYGNSKRPSGVPDRFSGSKSGTSASLAITGLQSEDEADYYCASWTDGLSLVVFGGGTKLTVL

SEQ ID NO: 1451 - protein, 8 aa, synthetic construct
GYSFSNYW

SEQ ID NO: 1452 - protein, 8 aa, synthetic construct
IDPSNSYT

SEQ ID NO: 1453 - protein, 10 aa, synthetic construct
ARWYYKPFDV

SEQ ID NO: 1454 - protein, 117 aa, synthetic construct
EVQLVQSGAEVKKPGESLKISCKGSGYSFSNYWIGWVRQMPGKGLEWMGIIDPSNSYTRYSPSFQGQVTISADKSISTAYLQWSSLKASDTAMYYCARWYYKPFDVWGQGTLVTVSS

SEQ ID NO: 1455 - protein, 6 aa, synthetic construct
DHILKF

SEQ ID NO: 1456 - protein, 9 aa, synthetic construct
QMYWSTPFT

SEQ ID NO: 1457 - protein, 107 aa, synthetic construct
DIQMTQSPSSLSASVGDRVTITCKASDHILKFLTWYQQKPGKAPKLLIYGATSLETGVPSRFSGSGSGTDFTLTISSLQPEDFATYYCQMYWSTPFTFGGGTKVEIK

SEQ ID NO: 1458 - protein, 8 aa, synthetic construct
GYKFTRYV

SEQ ID NO: 1459 - protein, 8 aa, synthetic construct
ARNWDTGL

SEQ ID NO: 1460 - protein, 115 aa, synthetic construct
QVQLVQSGAEVKKPGSSVKVSCKASGYKFTRYVMHWVRQAPGQGLEWMGYINPYNDGTNYNEKFKGRVTITADKSTSTAYMELSSLRSEDTAVYYCARNWDTGLWGQGTTVTVSS

SEQ ID NO: 1461 - protein, 6 aa, synthetic construct
ENIYSY

SEQ ID NO: 1462 - protein, 9 aa, synthetic construct
QHHYGIPFT

SEQ ID NO: 1463 - protein, 107 aa, synthetic construct [sequence omitted]

SEQ ID NO: 1464 - protein, 8 aa, synthetic construct
GYIFITYW

SEQ ID NO: 1465 - protein, 8 aa, synthetic construct
IFPASGSA

SEQ ID NO: 1466 - protein, 9 aa, synthetic construct
ARGGGGFAY

SEQ ID NO: 1467 - protein, 116 aa, synthetic construct [sequence omitted]

SEQ ID NO: 1468 - protein, 6 aa, synthetic construct
RDVAIA

SEQ ID NO: 1469 - protein, 9 aa, synthetic construct
HQYSSYPFT

SEQ ID NO: 1470 - protein, 107 aa, synthetic construct
DIQMTQSPSSLSASVGDRVTITCKASRDVAIAVAWYQQKPGKVPKLLIYWASTRHTGVPSRFSGSGSRTDFTLTISSLQPEDVADYFCHQYSSYPFTFGSGTKLEIK

SEQ ID NO: 1471 - protein, 8 aa, synthetic construct
GYTFTDQT

SEQ ID NO: 1472 - protein, 8 aa, synthetic construct
IYPRDDSP

SEQ ID NO: 1473 - protein, 13 aa, synthetic construct
AIPDRSGYAWFIY

SEQ ID NO: 1474 - protein, 120 aa, synthetic construct
QVQLVQSGAEVKKPGSSVKVSCKASGYTFTDQTIHWMRQAPGQGLEWIGYIYPRDDSPKYNENFKGKVTITADKSTSTAYMELSSLRSEDTAVYYCAIPDRSGYAWFIYWGQGTLVTVSS

SEQ ID NO: 1475 - protein, 11 aa, synthetic construct
QSLLYSIGYNY

SEQ ID NO: 1476 - protein, 9 aa, synthetic construct
MQALQTPYT

SEQ ID NO: 1477 - protein, 112 aa, synthetic construct [sequence omitted]

SEQ ID NO: 1478 - protein, 8 aa, synthetic construct
GFTFRDYA

SEQ ID NO: 1479 - protein, 8 aa, synthetic construct
ISGSGGNT

SEQ ID NO: 1480 - protein, 18 aa, synthetic construct
AKDRLSITIRPRYYGLDV

SEQ ID NO: 1481 - protein, 125 aa, synthetic construct [sequence omitted]

SEQ ID NO: 1482 - protein, 9 aa, synthetic construct
QNVHSFPFT

SEQ ID NO: 1483 - protein, 113 aa, synthetic construct [sequence omitted]

SEQ ID NO: 1484 - protein, 8 aa, synthetic construct
GFSLTSYS

SEQ ID NO: 1485 - protein, 7 aa, synthetic construct
IWASGGT

SEQ ID NO: 1486 - protein, 13 aa, synthetic construct
ARDPPSSLLRLDY

SEQ ID NO: 1487 - protein, 119 aa, synthetic construct [sequence omitted]

SEQ ID NO: 1488 - protein, 6 aa, synthetic construct
EGISSY

SEQ ID NO: 1489 - protein, 9 aa, synthetic construct
QQSYKFPNT

SEQ ID NO: 1490 - protein, 107 aa, synthetic construct [sequence omitted]

SEQ ID NO: 1491 - protein, 8 aa, synthetic construct
GLSLTSNS

SEQ ID NO: 1492 - protein, 7 aa, synthetic construct
IWSNGDT

SEQ ID NO: 1493 - protein, 10 aa, synthetic construct
AREYYGYFDY

SEQ ID NO: 1494 - protein, 116 aa, synthetic construct [sequence omitted]

SEQ ID NO: 1495 - protein, 6 aa, synthetic construct
QDISSY

SEQ ID NO: 1496 - protein, 9 aa, synthetic construct
QQGNTLPYT

SEQ ID NO: 1497 - protein, 107 aa, synthetic construct [sequence omitted]

SEQ ID NO: 1498 - protein, 9 aa, synthetic construct
GYSITSDHA

SEQ ID NO: 1499 - protein, 7 aa, synthetic construct
ISYSGIT

SEQ ID NO: 1500 - protein, 12 aa, synthetic construct
ARSLARTTAMDY

SEQ ID NO: 1501 - protein, 119 aa, synthetic construct [sequence omitted]

SEQ ID NO: 1502 - protein, 9 aa, synthetic construct
QQANSFPYT

SEQ ID NO: 1503 - protein, 107 aa, synthetic construct
DIQMTQSPSSVSASVGDRVTITCRASQGISSWLAWYQQKPGKAPKLLIYGASSLESGVPSRFSGSGSGTDFTLTISSLQPEDFASYYCQQANSFPYTFGQGTKLEIK

SEQ ID NO: 1504 - protein, 8 aa, synthetic construct
RFTFDDYA

SEQ ID NO: 1505 - protein, 8 aa, synthetic construct
ISWNSGRI

SEQ ID NO: 1506 - protein, 9 aa, synthetic construct
AKGRDSFDI

SEQ ID NO: 1507 - protein, 116 aa, synthetic construct
EVQLVESGGGLVQPGRSLRLSCAASRFTFDDYAMHWVRQAPGKGLEWVSGISWNSGRIGYADSVKGRFTISRDNAENSLFLQMNGLRAEDTALYYCAKGRDSFDIWGQGTMVTVSS

SEQ ID NO: 1508 - protein, 6 aa, synthetic construct
TDISSH

SEQ ID NO: 1509 - protein, 9 aa, synthetic construct
GQGNRLPYT

SEQ ID NO: 1510 - protein, 107 aa, synthetic construct
DIQMTQSPSSLSASVGDSVTITCQASTDISSHLNWYQQKPGKAPELLIYYGSHLLSGVPSRFSGSGSGTDFTFTISSLEAEDAATYYCGQGNRLPYTFGQGTKVEIE

SEQ ID NO: 1511 - protein, 9 aa, synthetic construct
GHSISHDHA

SEQ ID NO: 1512 - protein, 119 aa, synthetic construct
QVQLQESGPGLVKPSETLSLTCAVSGHSISHDHAWSWVRQPPGEGLEWIGFISYSGITNYNPSLQGRVTISRDNSKNTLYLQMNSLRAEDTAVYYCARSLARTTAMDYWGEGTLVTVSS

SEQ ID NO: 1513 - protein, 9 aa, synthetic construct
QQWSGYPYT

SEQ ID NO: 1514 - protein, 106 aa, synthetic construct [sequence omitted]

SEQ ID NO: 1515 - protein, 8 aa, synthetic construct
GFTFSSFA

SEQ ID NO: 1516 - protein, 8 aa, synthetic construct
ISSGGSYT

SEQ ID NO: 1517 - protein, 12 aa, synthetic construct
ARGLWGYYALDY

SEQ ID NO: 1518 - protein, 116 aa, synthetic construct
EVQLVESGGKLLKPGGSLKLSCAASGFTFSSFAMSWFRQSPEKRLEWVAEISSGGSYTYYPDTVTGRFTISRDNAKNTLYLEMSSLRSEDTAMYYCARGLWGYYALDYWGQGTSVT

SEQ ID NO: 1519 - protein, 7 aa, synthetic construct
SSVSSSY

SEQ ID NO: 1520 - protein, 9 aa, synthetic construct
HQFHRSPLT

SEQ ID NO: 1521 - protein, 108 aa, synthetic construct [sequence omitted]

SEQ ID NO: 1522 - protein, 8 aa, synthetic construct
GYSFTSSW

SEQ ID NO: 1523 - protein, 8 aa, synthetic construct
INPGNVRT

SEQ ID NO: 1524 - protein, 12 aa, synthetic construct
TVVFYGEPYFPY

SEQ ID NO: 1525 - protein, 119 aa, synthetic construct [sequence omitted]

SEQ ID NO: 1526 - protein, 11 aa, synthetic construct
QSLAKSYGNTY

SEQ ID NO: 1527 - protein, 112 aa, synthetic construct [sequence omitted]

SEQ ID NO: 1528 - protein, 8 aa, synthetic construct
IDPSESNT

SEQ ID NO: 1529 - protein, 14 aa, synthetic construct
ARGGYDGWDYAIDY

SEQ ID NO: 1530 - protein, 121 aa, synthetic construct [sequence omitted]

SEQ ID NO: 1531 - protein, 6 aa, synthetic construct
QSISNF

SEQ ID NO: 1532 - protein, 9 aa, synthetic construct
QQSGSWPLT

SEQ ID NO: 1533 - protein, 107 aa, synthetic construct
EIVLTQSPATLSLSPGERATLSCQASQSISNFLHWYQQRPGQAPRLLIRYRSQSISGIPARFSGSGSGTDFTLTISSLEPEDFAVYYCQQSGSWPLTFGGGTKVEIK

SEQ ID NO: 1534 - protein, 8 aa, synthetic construct
GFTFSSYD

SEQ ID NO: 1535 - protein, 8 aa, synthetic construct
VSSGGGST

SEQ ID NO: 1536 - protein, 10 aa, synthetic construct
ARHLHGSFAS

SEQ ID NO: 1537 - protein, 117 aa, synthetic construct
QVQLVESGGGVVQPGRSLRLSCAASGFTFSSYDMSWVRQAPGKGLEWVAKVSSGGGSTYYLDTVQGRFTISRDNSKNTLYLQMNSLRAEDTAVYYCARHLHGSFASWGQGTTVTVSS

SEQ ID NO: 1538 - protein, 6 aa, synthetic construct
QDINKY

SEQ ID NO: 1539 - protein, 8 aa, synthetic construct
LQYDNLWT

SEQ ID NO: 1540 - protein, 106 aa, synthetic construct [sequence omitted]

SEQ ID NO: 1541 - protein, 8 aa, synthetic construct
IDPANGYT

SEQ ID NO: 1542 - protein, 16 aa, synthetic construct
AREGYYGNYGVYAMDY

SEQ ID NO: 1543 - protein, 123 aa, synthetic construct [sequence omitted]

SEQ ID NO: 1544 - protein, 6 aa, synthetic construct
QGISGW

SEQ ID NO: 1545 - protein, 9 aa, synthetic construct
QQANSFPPT

SEQ ID NO: 1546 - protein, 107 aa, synthetic construct
DIQMTQSPSSVSASVGDRVTITCRASQGISGWLAWYQQKPGKAPKFLIYAASTLQSGVPSRFSGSGSGTDFTLTISSLQPEDFATYYCQQANSFPPTFGGGTKVEIK

SEQ ID NO: 1547 - protein, 8 aa, synthetic construct
GFTFSSYN

SEQ ID NO: 1548 - protein, 8 aa, synthetic construct
ISSSSSTI

SEQ ID NO: 1549 - protein, 10 aa, synthetic construct
ARAYYYGMDV

SEQ ID NO: 1550 - protein, 117 aa, synthetic construct
EVQLVESGGGLVQPGGSLRLSCAASGFTFSSYNMNWVRQAPGKGLEWVSYISSSSSTIYYADSVKGRFTISRDNAKNSLSLQMNSLRDEDTAVYYCARAYYYGMDVWGQGTTVTVSS

SEQ ID NO: 1551 - protein, 107 aa, synthetic construct
DIQMTQTTSSLSASLGDRVTISCRASQDISNYLNWYQQKPDGTVKLLIYYTSRLHSGVPSRFSGSGSGTDYSLTISNLEQEDIATYFCQQGNTLPWTFGGGTKLEIK

SEQ ID NO: 1552 - protein, 8 aa, synthetic construct
GYTFTSYD

SEQ ID NO: 1553 - protein, 8 aa, synthetic construct
IFPGDGST

SEQ ID NO: 1554 - protein, 14 aa, synthetic construct
AREDYYDNSYYFDY

SEQ ID NO: 1555 - protein, 121 aa, synthetic construct
QVQLQQSGAELVKPGASVKLSCKASGYTFTSYDINWVRQRPEQGLEWIGWIFPGDGSTKYNEKFKGKATLTTDKSSSTAYMQLSRLTSEDSAVYFCAREDYYDNSYYFDYWGQGTTLTVSS

SEQ ID NO: 1556 - protein, 6 aa, synthetic construct
QDVGTA

SEQ ID NO: 1557 - protein, 9 aa, synthetic construct
QHYSSYPWT

SEQ ID NO: 1558 - protein, 107 aa, synthetic construct
DIQLTQSPSFLSAYVGDRVTITCKASQDVGTAVAWYQQKPGKAPKLLIYWASTLHTGVPSRFSGSGSGTEFTLTISSLQPEDFATYYCQHYSSYPWTFGQGTKLEIK

SEQ ID NO: 1559 - protein, 8 aa, synthetic construct
ISGGGSYT

SEQ ID NO: 1560 - protein, 9 aa, synthetic construct
ASPYYAMDY

SEQ ID NO: 1561 - protein, 116 aa, synthetic construct
EVQLLESGGGLVQPGGSLRLSCAASGFTFSSYDMSWVRQAPGKGLEWVSTISGGGSYTYYQDSVKGRFTISRDNSKNTLYLQMNSLRAEDTAVYYCASPYYAMDYWGQGTTVTVSS

SEQ ID NO: 1562 - protein, 9 aa, synthetic construct
QQSSNWPRT

SEQ ID NO: 1563 - protein, 107 aa, synthetic construct [sequence omitted]

SEQ ID NO: 1564 - protein, 8 aa, synthetic construct
GITFSNSG

SEQ ID NO: 1565 - protein, 8 aa, synthetic construct
IWYDGSKR

SEQ ID NO: 1566 - protein, 6 aa, synthetic construct
ATNDDY

SEQ ID NO: 1567 - protein, 113 aa, synthetic construct [sequence omitted]

SEQ ID NO: 1568 - protein, 10 aa, synthetic construct
KGVSTSGYSY

SEQ ID NO: 1569 - protein, 9 aa, synthetic construct
QHSRDLPLT

SEQ ID NO: 1570 - protein, 111 aa, synthetic construct [sequence omitted]

SEQ ID NO: 1571 - protein, 8 aa, synthetic construct
INPSNGGT

SEQ ID NO: 1572 - protein, 13 aa, synthetic construct
ARRDYRFDMGFDY

SEQ ID NO: 1573 - protein, 120 aa, synthetic construct [sequence omitted]

SEQ ID NO: 1574 - protein, 10 aa, synthetic construct
ESVDNYGMSF

SEQ ID NO: 1575 - protein, 9 aa, synthetic construct
QQSKEVPYT

SEQ ID NO: 1576 - protein, 111 aa, synthetic construct
EIVLTQSPATLSLSPGERATLSCRASESVDNYGMSFMNWFQQKPGQPPKLLIHAASNQGSGVPSRFSGSGSGTDFTLTISSLEPEDFAVYFCQQSKEVPYTFGGGTKVEIK

SEQ ID NO: 1577 - protein, 8 aa, synthetic construct
GYSFTSYW

SEQ ID NO: 1578 - protein, 8 aa, synthetic construct
IHPSDSET

SEQ ID NO: 1579 - protein, 12 aa, synthetic construct
AREHYGTSPFAY

SEQ ID NO: 1580 - protein, 119 aa, synthetic construct
QVQLVQSGAEVKKPGASVKVSCKASGYSFTSYWMNWVRQAPGQGLEWIGVIHPSDSETWLDQKFKDRVTITVDKSTSTAYMELSSLRSEDTAVYYCAREHYGTSPFAYWGQGTLVTVSS

SEQ ID NO: 1581 - protein, 6 aa, synthetic construct
LSINTF

SEQ ID NO: 1582 - protein, 9 aa, synthetic construct
QQSSNTPFT

SEQ ID NO: 1583 - protein, 107 aa, synthetic construct [sequence omitted]

SEQ ID NO: 1584 - protein, 8 aa, synthetic construct
GFTFSNFG

SEQ ID NO: 1585 - protein, 8 aa, synthetic construct
ISGGGRDT

SEQ ID NO: 1586 - protein, 10 aa, synthetic construct
VKWGNIYFDY

SEQ ID NO: 1587 - protein, 117 aa, synthetic construct [sequence omitted]

SEQ ID NO: 1588 - protein, 9 aa, synthetic construct
QQRSNWPPA

SEQ ID NO: 1589 - protein, 107 aa, synthetic construct
EIVLTQSPATLSLSPGERATLSCRASQSVSSYLAWYQQKPGQAPRLLIYDASNRATGIPARFSGSGSGTDFTLTISSLEPEDFAVYYCQQRSNWPPAFGQGTKVEIK

SEQ ID NO: 1590 - protein, 10 aa, synthetic construct
GGSINSSSYY

SEQ ID NO: 1591 - protein, 7 aa, synthetic construct
FFYTGST

SEQ ID NO: 1592 - protein, 19 aa, synthetic construct
ARQSTYYYGSGNYYGWFDR

SEQ ID NO: 1593 - protein, 127 aa, synthetic construct
QLQLQESGPGLVKPSETLSLTCTVSGGSINSSSYYWGWLRQSPGKGLEWIGSFFYTGSTYYNPSLRSRLTISVDTSKNQFSLMLSSVTAADTAVYYCARQSTYYYGSGNYYGWFDRWDQGTLVTVSS

SEQ ID NO: 1594 - protein, 6 aa, synthetic construct
QDVSTA

SEQ ID NO: 1595 - protein, 9 aa, synthetic construct
QQYLYHPAT

SEQ ID NO: 1596 - protein, 107 aa, synthetic construct [sequence omitted]

SEQ ID NO: 1597 - protein, 8 aa, synthetic construct
GFTFSDSW

SEQ ID NO: 1598 - protein, 8 aa, synthetic construct
ISPYGGST

SEQ ID NO: 1599 - protein, 11 aa, synthetic construct
ARRHWPGGFDY

SEQ ID NO: 1600 - protein, 118 aa, synthetic construct [sequence omitted]

SEQ ID NO: 1601 - protein, 9 aa, synthetic construct
SSDVGGYNY

SEQ ID NO: 1602 - protein, 10 aa, synthetic construct
SSYTSSSTRV

SEQ ID NO: 1603 - protein, 110 aa, synthetic construct
QSALTQPASVSGSPGQSITISCTGTSSDVGGYNYVSWYQQHPGKAPKLMIYDVSNRPSGVSNRFSGSKSGNTASLTISGLQAEDEADYYCSSYTSSSTRVFGTGTKVTVL

SEQ ID NO: 1604 - protein, 8 aa, synthetic construct
GFTFSSYI

SEQ ID NO: 1605 - protein, 8 aa, synthetic construct
IYPSGGIT

SEQ ID NO: 1606 - protein, 13 aa, synthetic construct
ARIKLGTVTTVDY

SEQ ID NO: 1607 - protein, 120 aa, synthetic construct
EVQLLESGGGLVQPGGSLRLSCAASGFTFSSYIMMWVRQAPGKGLEWVSSIYPSGGITFYADTVKGRFTISRDNSKNTLYLQMNSLRAEDTAVYYCARIKLGTVTTVDYWGQGTLVTVSS

SEQ ID NO: 1608 - protein, 7 aa, synthetic construct
QRVSSSY

SEQ ID NO: 1609 - protein, 9 aa, synthetic construct
QQYGSLPWT

SEQ ID NO: 1610 - protein, 108 aa, synthetic construct
EIVLTQSPGTLSLSPGERATLSCRASQRVSSSYLAWYQQKPGQAPRLLIYDASSRATGIPDRFSGSGSGTDFTLTISRLEPEDFAVYYCQQYGSLPWTFGQGTKVEIK

SEQ ID NO: 1611 - protein, 8 aa, synthetic construct
GFTFSRYW

SEQ ID NO: 1612 - protein, 8 aa, synthetic construct
IKQDGSEK

SEQ ID NO: 1613 - protein, 14 aa, synthetic construct
AREGGWFGELAFDY

SEQ ID NO: 1614 - protein, 121 aa, synthetic construct
EVQLVESGGGLVQPGGSLRLSCAASGFTFSRYWMSWVRQAPGKGLEWVANIKQDGSEKYYVDSVKGRFTISRDNAKNSLYLQMNSLRAEDTAVYYCAREGGWFGELAFDYWGQGTLVTVSS

SEQ ID NO: 1615 - protein, 7 aa, synthetic construct
QSVRGRY

SEQ ID NO: 1616 - protein, 9 aa, synthetic construct
QQYGSSPRT

SEQ ID NO: 1617 - protein, 108 aa, synthetic construct
EIVLTQSPGTLSLSPGERATLSCRASQSVRGRYLAWYQQKPGQAPRLLIYGASSRATGIPDRFSGSGSGTDFTLTISRLEPEDFAVFYCQQYGSSPRTFGQGTKVEIK

SEQ ID NO: 1618 - protein, 8 aa, synthetic construct
GFTFSSYA

SEQ ID NO: 1619 - protein, 8 aa, synthetic construct
ITGSGGST

SEQ ID NO: 1620 - protein, 15 aa, synthetic construct
AKDPGTTVIMSWFDP

SEQ ID NO: 1621 - protein, 122 aa, synthetic construct
EVQLLESGGGLVQPGGSLRLSCAASGFTFSSYAMSWVRQAPGKGLEWVSGITGSGGSTYYADSVKGRFTISRDNSKNTLYLQMNSLRAEDTAVYYCAKDPGTTVIMSWFDPWGQGTLVTVSS

SEQ ID NO: 1622 - protein, 6 aa, synthetic construct
QDVGIA

SEQ ID NO: 1623 - protein, 9 aa, synthetic construct
QQYSSYPYT

SEQ ID NO: 1624 - protein, 107 aa, synthetic construct
DIQMTQSPSSLSASVGDRVTITCKASQDVGIAVAWYQQKPGKVPKLLIYWASTRHTGVPDRFSGSGSGTDFTLTISSLQPEDVATYYCQQYSSYPYTFGQGTKVEIK

SEQ ID NO: 1625 - protein, 8 aa, synthetic construct
GFDFSRYW

SEQ ID NO: 1626 - protein, 8 aa, synthetic construct
INPDSSTI

SEQ ID NO: 1627 - protein, 12 aa, synthetic construct
ARPDGNYWYFDV

SEQ ID NO: 1628 - protein, 119 aa, synthetic construct
EVQLVESGGGLVQPGGSLRLSCAASGFDFSRYWMSWVRQAPGKGLEWIGEINPDSSTINYAPSLKDKFIISRDNAKNSLYLQMNSLRAEDTAVYYCARPDGNYWYFDVWGQGTLVTVSS

SEQ ID NO: 1629 - protein, 6 aa, synthetic construct
QFVGSS

SEQ ID NO: 1630 - protein, 9 aa, synthetic construct
QQSHSWPFT

SEQ ID NO: 1631 - protein, 107 aa, synthetic construct
DILLTQSPAILSVSPGERVSFSCRASQFVGSSIHWYQQRTNGSPRLLIKYASESMSGIPSRFSGSGSGTDFTLSINTVESEDIADYYCQQSHSWPFTFGSGTNLEVK

SEQ ID NO: 1632 - protein, 8 aa, synthetic construct
GFIFSNHW

SEQ ID NO: 1633 - protein, 10 aa, synthetic construct
IRSKSINSAT

SEQ ID NO: 1634 - protein, 11 aa, synthetic construct
SRNYYGSTYDY

SEQ ID NO: 1635 - protein, 119 aa, synthetic construct
EVKLEESGGGLVQPGGSMKLSCVASGFIFSNHWMNWVRQSPEKGLEWVAEIRSKSINSATHYAESVKGRFTISRDDSKSAVYLQMTDLRTEDTGVYYCSRNYYGSTYDYWGQGTTLTVS

SEQ ID NO: 1636 - protein, 6 aa, synthetic construct
QGIRNY

SEQ ID NO: 1637 - protein, 9 aa, synthetic construct
QRYNRAPYT

SEQ ID NO: 1638 - protein, 107 aa, synthetic construct [sequence omitted]

SEQ ID NO: 1639 - protein, 8 aa, synthetic construct
GFTFDDYA

SEQ ID NO: 1640 - protein, 8 aa, synthetic construct
ITWNSGHI

SEQ ID NO: 1641 - protein, 14 aa, synthetic construct
AKVSYLSTASSLDY

SEQ ID NO: 1642 - protein, 121 aa, synthetic construct [sequence omitted]

SEQ ID NO: 1643 - protein, 6 aa, synthetic construct
QNVGTN

SEQ ID NO: 1644 - protein, 9 aa, synthetic construct
QQYNIYPLT

SEQ ID NO: 1645 - protein, 107 aa, synthetic construct
DIQMTQSPSSLSASVGDRVTITCKASQNVGTNVAWYQQKPGKAPKALIYSASFLYSGVPYRFSGSGSGTDFTLTISSLQPEDFATYYCQQYNIYPLTFGQGTKVEIK

SEQ ID NO: 1646 - protein, 8 aa, synthetic construct
GYVFTDYG

SEQ ID NO: 1647 - protein, 8 aa, synthetic construct
INTYIGEP

SEQ ID NO: 1648 - protein, 11 aa, synthetic construct
ARGYRSYAMDY

SEQ ID NO: 1649 - protein, 118 aa, synthetic construct
EVQLVESGGGLVQPGGSLRLSCAASGYVFTDYGMNWVRQAPGKGLEWMGWINTYIGEPIYADSVKGRFTFSLDTSKSTAYLQMNSLRAEDTAVYYCARGYRSYAMDYWGQGTLVTVSS

SEQ ID NO: 1650 - protein, 6 aa, synthetic construct
QSVYSY

SEQ ID NO: 1651 - protein, 10 aa, synthetic construct
QQRSNWPPFT

SEQ ID NO: 1652 - protein, 108 aa, synthetic construct
EIVLTQSPATLSLSPGERATLSCRASQSVYSYLAWYQQKPGQAPRLLIYDASNRATGIPARFSGSGSGTDFTLTISSLEPEDFAVYYCQQRSNWPPFTFGPGTKVDIK

SEQ ID NO: 1653 - protein, 8 aa, synthetic construct
GFIFSSYA

SEQ ID NO: 1654 - protein, 8 aa, synthetic construct
MSYDGSNK

SEQ ID NO: 1655 - protein, 19 aa, synthetic construct
ARDRGIAAGGNYYYYGMDV

SEQ ID NO: 1656 - protein, 126 aa, synthetic construct
QVQLVESGGGVVQPGRSLRLSCAASGFIFSSYAMHWVRQAPGNGLEWVAFMSYDGSNKKYADSVKGRFTISRDNSKNTLYLQMNSLRAEDTAVYYCARDRGIAAGGNYYYYGMDVWGQGTTVTVSS

SEQ ID NO: 1657 - protein, 6 aa, synthetic construct
NLGSKS

SEQ ID NO: 1658 - protein, 11 aa, synthetic construct
QVWDSSSDHVV

SEQ ID NO: 1659 - protein, 108 aa, synthetic construct
SYVLTQPPSVSVAPGQTARITCGGNNLGSKSVHWYQQKPGQAPVLVVYDDSDRPSWIPERFSGSNSGNTATLTISRGEAGDEADYYCQVWDSSSDHVVFGGGTKLTVL

SEQ ID NO: 1660 - protein, 8 aa, synthetic construct
GFTFRTYG

SEQ ID NO: 1661 - protein, 15 aa, synthetic construct
ARAPQWELVHEAFDI

SEQ ID NO: 1662 - protein, 122 aa, synthetic construct
QMQLVESGGGVVQPGRSLRLSCAASGFTFRTYGMHWVRQAPGKGLEWVAVIWYDGSNKHYADSVKGRFTITRDNSKNTLNLQMNSLRAEDTAVYYCARAPQWELVHEAFDIWGQGTMVTVSS

SEQ ID NO: 1663 - protein, 9 aa, synthetic construct
QQYSTVPWT

SEQ ID NO: 1664 - protein, 107 aa, synthetic construct [sequence omitted]

SEQ ID NO: 1665 - protein, 8 aa, synthetic construct
GYDFTHYG

SEQ ID NO: 1666 - protein, 8 aa, synthetic construct
INTYTGEP

SEQ ID NO: 1667 - protein, 16 aa, synthetic construct
AKYPYYYGTSHWYFDV

SEQ ID NO: 1668 - protein, 123 aa, synthetic construct [sequence omitted]

SEQ ID NO: 1669 - protein, 107 aa, synthetic construct [sequence omitted]

SEQ ID NO: 1670 - protein, 16 aa, synthetic construct
AKYPHYYGSSHWYFDV

SEQ ID NO: 1671 - protein, 123 aa, synthetic construct [sequence omitted]

SEQ ID NO: 1672 - protein, 6 aa, synthetic construct
QGIDNW

SEQ ID NO: 1673 - protein, 9 aa, synthetic construct
QQAKAFPPT

SEQ ID NO: 1674 - protein, 107 aa, synthetic construct [sequence omitted]

SEQ ID NO: 1675 - protein, 8 aa, synthetic construct
GFTFSSYS

SEQ ID NO: 1676 - protein, 8 aa, synthetic construct
ISSSSSYI

SEQ ID NO: 1677 - protein, 9 aa, synthetic construct
ARVTDAFDI

SEQ ID NO: 1678 - protein, 116 aa, synthetic construct [sequence omitted]

SEQ ID NO: 1679 - protein, 18 aa, synthetic construct
KSSQSLLYTSSQKNYLAW

SEQ ID NO: 1680 - protein, 7 aa, synthetic construct
WASTRES

SEQ ID NO: 1681 - protein, 9 aa, synthetic construct
QQYYAYPWT

SEQ ID NO: 1682 - protein, 113 aa, synthetic construct
DIVMTQSPDSLAVSLGERATINCKSSQSLLYTSSQKNYLAWYQQKPGQPPKLLIYWASTRESGVPDRFSGSGSGTDFTLTISSLQAEDVAVYYCQQYYAYPWTFGGGTKLEIK

SEQ ID NO: 1683 - protein, 7 aa, synthetic construct
GYTFTSY

SEQ ID NO: 1684 - protein, 6 aa, synthetic construct
DPSNSD

SEQ ID NO: 1685 - protein, 10 aa, synthetic construct
YKSYVSPLDY

SEQ ID NO: 1686 - protein, 119 aa, synthetic construct
QVQLVQSGAEVVKPGASVKLSCKASGYTFTSYWLHWVRQAPGQGLEWVGMIDPSNSDTRFNPNFKDRVTITADTSTSTAYMELSSLRSEDTAVYYCATYKSYVSPLDYWGQGTSVTVSS

SEQ ID NO: 1687 - protein, 18 aa, synthetic construct
GMIDPSNSDTRFNPNFKD

SEQ ID NO: 1688 - protein, 12 aa, synthetic construct
ATYKSYVSPLDY

SEQ ID NO: 1689 - protein, 11 aa, synthetic construct
QASQDINKYLA

SEQ ID NO: 1690 - protein, 7 aa, synthetic construct
YTSNLQT

SEQ ID NO: 1691 - protein, 8 aa, synthetic construct
LQYDDLFT

SEQ ID NO: 1692 - protein, 106 aa, synthetic construct
DIQMTQSPSSLSASVGDRVTITCQASQDINKYLAWYQKKPGKAPKLLIHYTSNLQTGVPSRFSGSGSGTDFTFTISSLQPEDIATYYCLQYDDLFTFGQGTKLEIK

SEQ ID NO: 1693 - protein, 7 aa, synthetic construct
GSSFTGY

SEQ ID NO: 1694 - protein, 6 aa, synthetic construct
NPYQGD

SEQ ID NO: 1695 - protein, 9 aa, synthetic construct
GAGLYYFDY

SEQ ID NO: 1696 - protein, 118 aa, synthetic construct
QVQLVQSGAEVKKPGASVKVSCKASGSSFTGYTMNWVKQAPGQGLEWIGIINPYQGDTTYNQKFQGKVTITVDKSTSTVYMELSSLRSEDTAVYYCARGAGLYYFDYWGQGTTVTVSS

SEQ ID NO: 1697 - protein, 10 aa, synthetic construct
QSVDSYGNSF

SEQ ID NO: 1698 - protein, 6 aa, synthetic construct
WASNRA

SEQ ID NO: 1699 - protein, 9 aa, synthetic construct
QQNNEDLWT

SEQ ID NO: 1700 - protein, 111 aa, synthetic construct
EIVLTQSPATLSLSPGERATLSCRASQSVDSYGNSFLHWYQQKPGQAPRLLIYWASNRATGIPARFSGSGSGTDFTLTISSLEPEDFAVYYCQQNNEDLWTFGGGTKLEIK

SEQ ID NO: 1701 - protein, 8 aa, synthetic construct
GFTFQNYA

SEQ ID NO: 1702 - protein, 8 aa, synthetic construct
ISSDATYT

SEQ ID NO: 1703 - protein, 11 aa, synthetic construct
HPPSYYYAFDY

SEQ ID NO: 1704 - protein, 120 aa, synthetic construct
EVQLVESGGGLVKPGGSLRLSCAASGFTFQNYAMSWVRQAPGKGLEWVSSISSDATYTYYADSVKGRFTISRDNAKNVLYLQMTSLRAEDTAVYYCARHPPSYYYAFDYWGQGTTLTVSS

SEQ ID NO: 1705 - protein, 8 aa, synthetic construct
GSSFTGYT

SEQ ID NO: 1706 - protein, 7 aa, synthetic construct
NPYQGDT

SEQ ID NO: 1707 - protein, 11 aa, synthetic construct
ARGAGLYYFDY

SEQ ID NO: 1708 - protein, 11 aa, synthetic construct
HASQNIYVWLN

SEQ ID NO: 1709 - protein, 7 aa, synthetic construct
KASNLHT

SEQ ID NO: 1710 - protein, 9 aa, synthetic construct
QQGQTYPYT

SEQ ID NO: 1711 - protein, 107 aa, synthetic construct
DIQMTQSPSSLSASVGDRVTITCHASQNIYVWLNWYQQKPGKAPKLLIYKASNLHTGVPSRFSGSGSGTDFTLTISSLQPEDFATYYCQQGQTYPYTFGGGTKVEIK

SEQ ID NO: 1712 - protein, 6 aa, synthetic construct
YPGNVN

SEQ ID NO: 1713 - protein, 11 aa, synthetic construct
SHYGLDWNFDV

SEQ ID NO: 1714 - protein, 120 aa, synthetic construct
QVQLVQSGAEVKKPGASVKVSCKASGYTFTSYYIHWVRQAPGQGLEWIGSIYPGNVNTNYNEKFKDRATLTVDTSISTAYMELSRLRSDDTAVYFCTRSHYGLDWNFDVWGQGTTVTVSS

SEQ ID NO: 1715 - protein, 11 aa, synthetic construct
HASQNIYVWLN

SEQ ID NO: 1716 - protein, 5 aa, synthetic construct
SYYIH

SEQ ID NO: 1717 - protein, 17 aa, synthetic construct
SIYPGNVNTNYNEKFKD

SEQ ID NO: 1718 - protein, 9 aa, synthetic construct
HASQNIYVW

SEQ ID NO: 1719 - protein, 9 aa, synthetic construct
GYTFTSYYI

SEQ ID NO: 1720 - protein, 8 aa, synthetic construct
IYPGNVNT

SEQ ID NO: 1721 - protein, 107 aa, synthetic construct
DIQMTQSPSSLSASVGDRVTITCHASQNIYVWLNWYQQKPGKAPKLLIYKASNLHTGVPSRFSGSGSGTDFTLTISSLQPEDFATYYCQQGQTYPYTFGCGTKVEIK

SEQ ID NO: 1722 - protein, 120 aa, synthetic construct
QVQLVQSGAEVKKPGASVKVSCKASGYTFTSYYIHWVRQAPGQCLEWIGSIYPGNVNTNYNEKFKDRATLTVDTSISTAYMELSRLRSDDTAVYFCTRSHYGLDWNFDVWGQGTTVTVSS

SEQ ID NO: 1723 - protein, 11 aa, synthetic construct
QASQNIYVWLN

SEQ ID NO: 1724 - protein, 107 aa, synthetic construct
DIQMTQSPSSLSASVGDRVTITCQASQNIYVWLNWYQQKPGKAPKLLIYKASNLHTGVPSRFSGSGSGTDFTLTISSLQPEDIATYYCQQGQTYPYTFGQGTKLEIK

SEQ ID NO: 1725 - protein, 17 aa, synthetic construct
SIYPGNVNTNYAQKFQG

SEQ ID NO: 1726 - protein, 120 aa, synthetic construct
QVQLVQSGAEVVKPGASVKVSCKASGYTFTSYYIHWVRQAPGQGLEWIGSIYPGNVNTNYAQKFQGRATLTVDTSISTAYMELSRLRSDDTAVYYCTRSHYGLDWNFDVWGKGTTVTVSS

SEQ ID NO: 1727 - protein, 10 aa, synthetic construct
RASQSISYLN

SEQ ID NO: 1728 - protein, 7 aa, synthetic construct
DTSKLAS

SEQ ID NO: 1729 - protein, 9 aa, synthetic construct
QQWSSNPLT

SEQ ID NO: 1730 - protein, 106 aa, synthetic construct
DIQLTQSPSSLSASVGDRVTITCRASQSISYLNWYQQKPGKSPKRWIYDTSKLASGVPSRFSGSGSGTDYTLTISSMQPEDAATYYCQQWSSNPLTFGGGTKVEIK

SEQ ID NO: 1731 - protein, 7 aa, synthetic construct
GYTFTRY

SEQ ID NO: 1732 - protein, 6 aa, synthetic construct
NPSRGY

SEQ ID NO: 1733 - protein, 10 aa, synthetic construct
YYDDHYSLDY

SEQ ID NO: 1734 - protein, 119 aa, synthetic construct
QVQLVQSGAEVAKPGASVKVSCKASGYTFTRYTMHWVKQAPGQGLEWIGYINPSRGYTNYAQKFQGKATLTTDKSTSTAYMELSSLRSEDTAVYYCARYYDDHYSLDYWGQGTTLTVSS

SEQ ID NO: 1735 - protein, 10 aa, synthetic construct
QQWSSNPLTF

SEQ ID NO: 1736 - protein, 5 aa, synthetic construct
RYTMH

SEQ ID NO: 1737 - protein, 17 aa, synthetic construct
YINPSRGYTNYAQKFQG

SEQ ID NO: 1738 - protein, 10 aa, synthetic construct
RASSSVSYMN

SEQ ID NO: 1739 - protein, 7 aa, synthetic construct
DTSKVAS

SEQ ID NO: 1740 - protein, 106 aa, synthetic construct
DIQLTQSPAIMSASPGEKVTMTCRASSSVSYMNWYQQKSGTSPKRWIYDTSKVASGVPYRFSGSGSGTSYSLTISSMEAEDAATYYCQQWSSNPLTFGAGTKLELK

SEQ ID NO: 1741 - protein, 17 aa, synthetic construct
YINPSRGYTNYNQKFKD

SEQ ID NO: 1742 - protein, 119 aa, synthetic construct
DIKLQQSGAELARPGASVKMSCKTSGYTFTRYTMHWVKQRPGQGLEWIGYINPSRGYTNYNQKFKDKATLTTDKSSSTAYMQLSSLTSEDSAVYYCARYYDDHYSLDYWGQGTTLTVSS

SEQ ID NO: 1743 - protein, 16 aa, synthetic construct
KSSQSLVHNNANTYLS

SEQ ID NO: 1744 - protein, 7 aa, synthetic construct
KVSNRFS

SEQ ID NO: 1745 - protein, 8 aa, synthetic construct
GQGTQYPF

SEQ ID NO: 1746 - protein, 112 aa, synthetic construct
DIVMTQTPLSLSVTPGQPASISCKSSQSLVHNNANTYLSWYLQKPGQSPQSLIYKVSNRFSGVPDRFSGSGSGTDFTLKISRVEAEDVGVYYCGQGTQYPFTFGSGTKVEIK

SEQ ID NO: 1747 - protein, 5 aa, synthetic construct
KAWMH

SEQ ID NO: 1748 - protein, 19 aa, synthetic construct
QIKDKSNSYATYYADSVKG

SEQ ID NO: 1749 - protein, 10 aa, synthetic construct
VYYALSPFDY

SEQ ID NO: 1750 - protein, 121 aa, synthetic construct
QVQLVESGGGVVQPGRSLRLSCAASGFTFTKAWMHWVRQAPGKQLEWVAQIKDKSNSYATYYADSVKGRFTISRDDSKNTLYLQMNSLRAEDTAVYYCRGVYYALSPFDYWGQGTLVTVSS

SEQ ID NO: 1751 - protein, 9 aa, synthetic construct
GQGTQYPFT

SEQ ID NO: 1752 - protein, 15 aa, synthetic construct
RASQSVSSYGQGFMH

SEQ ID NO: 1753 - protein, 7 aa, synthetic construct
GASSRAT

SEQ ID NO: 1754 - protein, 9 aa, synthetic construct
QQNKEDPWT

SEQ ID NO: 1755 - protein, 111 aa, synthetic construct
DIVLTQSPATLSLSPGERATISCRASQSVSSYGQGFMHWYQQKPGQPPRLLIYGASSRATGIPARFSGSGSGTDFTLTISPLEPEDFAVYYCQQNKEDPWTFGGGTKLEIK

SEQ ID NO: 1756 - protein, 5 aa, synthetic construct
SYAMH

SEQ ID NO: 1757 - protein, 17 aa, synthetic construct
YIYPGQGGTNYNQKFQG

SEQ ID NO: 1758 - protein, 11 aa, synthetic construct
TGGLRRAYFTY

SEQ ID NO: 1759 - protein, 120 aa, synthetic construct
QVQLVQSGAEVVKPGASVKVSCKASGYTFTSYAMHWVKEAPGQRLEWIGYIYPGQGGTNYNQKFQGRATLTADTSASTAYMELSSLRSEDTAVYFCARTGGLRRAYFTYWGQGTLVTVSS

SEQ ID NO: 1760 - protein, 120 aa, synthetic construct
QVQLVQSGAEVVKPGASVKVSCKASGYTFTSYAMHWVKEAPGQGLEWIGYIYPGQGGTNYNQKFQGRATLTADTSASTAYMELSSLRSEDTAVYFCARTGGLRRAYFTYWGQGTLVTVSS

SEQ ID NO: 1761 - protein, 5 aa, synthetic construct
QSISY

SEQ ID NO: 1762 - protein, 12 aa, synthetic construct
ARYYDDHYSLDY

SEQ ID NO: 1763 - protein, 6 aa, synthetic construct
SSSVSY

SEQ ID NO: 1764 - protein, 106 aa, synthetic construct
EIQLTQSPSSLSASVGDRVTITCRASSSVSYIHWFQQKPGSAPKSLIYATSNLASGVPSRFSGSGSGTDYTLTISSLQPEDFATYYCQQWTSNPPTFGGGTKLEIK

SEQ ID NO: 1765 - protein, 121 aa, synthetic construct
QVQLVQPGAEVKKPGASVKMSCKASGYTFTSYNMHWVRQAPGRGLEWMGAIYPGNGDTSYNQKFQGRVTLTADKSTSTAYMELSSLESEDTAVYYCARSTYYGGDWYFNVWGAGTTVTVSA

SEQ ID NO: 1766 - protein, 106 aa, synthetic construct
EIQLTQSPSSLSASVGDRVTITCRASSSVSYIHWFQQKPGSAPKSLIYATSNLASGVPSRFSGSGSGTDYTLTISSLQPEDFATYYCQQWTSNPPTFGCGTKLEIK

SEQ ID NO: 1767 - protein, 8 aa, synthetic construct
IYPGSGDT

SEQ ID NO: 1768 - protein, 121 aa, synthetic construct
QVQLVQPGAEVKKPGASVKMSCKASGYTFTSYNMHWVRQAPGRCLEWMGAIYPGSGDTSYSQKFQGKVTLTADKSTSTAYMELSSLESEDTAVYYCARSTYYGGDWYFNVWGAGTTVTVSA

SEQ ID NO: 1769 - protein, 10 aa, synthetic construct
RASSSVNYMD

SEQ ID NO: 1770 - protein, 7 aa, synthetic construct
ATSNLAS

SEQ ID NO: 1771 - protein, 106 aa, synthetic construct
DIVLTQSPAILSASPGEKVTMTCRASSSVNYMDWYQKKPGSSPKPWIYATSNLASGVPARFSGSGSGTSYSLTISRVEAEDAATYYCQQWSFNPPTFGGGTKLEIK

SEQ ID NO: 1772 - protein, 5 aa, synthetic construct
SYNMH

SEQ ID NO: 1773 - protein, 17 aa, synthetic construct
AIYPGNGDTSYNQKFKG

SEQ ID NO: 1774 - protein, 13 aa, synthetic construct
SNYYGSSYWFFDV

SEQ ID NO: 1775 - protein, 122 aa, synthetic construct
EVQLQQSGAELVKPGASVKMSCKASGYTFTSYNMHWVKQTPGQGLEWIGAIYPGNGDTSYNQKFKGKATLTADKSSSTAYMQLSSLTSEDSADYYCARSNYYGSSYWFFDVWGAGTTVTVSS

SEQ ID NO: 1776 - protein, 10 aa, synthetic construct
QSVDYSGDSY

SEQ ID NO: 1777 - protein, 7 aa, synthetic construct
DASNLVS

SEQ ID NO: 1778 - protein, 9 aa, synthetic construct
QQSTENPWT

SEQ ID NO: 1779 - protein, 111 aa, synthetic construct
DIQLTQSPSFLSASVGDRVTITCKASQSVDYSGDSYLNWYQQKPGKAPKLLIYDASNLVSGVPSRFSGSGSGTEFTLTISSLQPEDFATYYCQQSTENPWTFGGGTKLEIK

SEQ ID NO: 1780 - protein, 8 aa, synthetic construct
GYAFSSYW

SEQ ID NO: 1781 - protein, 8 aa, synthetic construct
IWPGDSDT

SEQ ID NO: 1782 - protein, 17 aa, synthetic construct
ARRETTTVGRYYYAMDY

SEQ ID NO: 1783 - protein, 124 aa, synthetic construct
QVQLVQSGAEVKKPGSSVKVSCKASGYAFSSYWMNWVRQAPGQGLEWMGQIWPGDSDTNYAQKFQGRVTITADESTSTAYMELSSLRSEDTAVYYCARRETTTVGRYYYAMDYWGQGTTVTVSS

SEQ ID NO: 1784 - protein, 111 aa, synthetic construct
DIQLTQSPSFLSASVGDRVTITCKASQSVDYSGDSYLNWYQQKPGKAPKLLIYDASNLVSGVPSRFSGSGSGTEFTLTISSLQPEDFATYYCQQSTENPWTFGCGTKLEIK

SEQ ID NO: 1785 - protein, 124 aa, synthetic construct
QVQLVQSGAEVKKPGSSVKVSCKASGYAFSSYWMNWVRQAPGQCLEWMGQIWPGDSDTNYAQKFQGRVTITADESTSTAYMELSSLRSEDTAVYYCARRETTTVGRYYYAMDYWGQGTTVTVSS

SEQ ID NO: 1786 - protein, 15 aa, synthetic construct
KASQSVDYDGDSYLN

SEQ ID NO: 1787 - protein, 9 aa, synthetic construct
QQSTEDPWT

SEQ ID NO: 1788 - protein, 111 aa, synthetic construct
DIQLTQSPASLAVSLGQRATISCKASQSVDYDGDSYLNWYQQIPGQPPKLLIYDASNLVSGIPPRFSGSGSGTDFTLNIHPVEKVDAATYHCQQSTEDPWTFGGGTKLEIK

SEQ ID NO: 1789 - protein, 5 aa, synthetic construct
SYWMN

SEQ ID NO: 1790 - protein, 17 aa, synthetic construct
QIWPGDGDTNYNGKFKG

SEQ ID NO: 1791 - protein, 15 aa, synthetic construct
RETTTVGRYYYAMDY

SEQ ID NO: 1792 - protein, 124 aa, synthetic construct
QVQLQQSGAELVRPGSSVKISCKASGYAFSSYWMNWVKQRPGQGLEWIGQIWPGDGDTNYNGKFKGKATLTADESSSTAYMQLSSLASEDSAVYFCARRETTTVGRYYYAMDYWGQGTTVTVSS

SEQ ID NO: 1793 - protein, 6 aa, synthetic construct
QDIRNY

SEQ ID NO: 1794 - protein, 107 aa, synthetic construct
DIQMTQSPSSLSASVGDRVTITCRASQDIRNYLNWYQQKPGKAVKLLIYYTSRLLPGVPSRFSGSGSGTDYSLTISSQEQEDIGTYFCQQGNTLPWTFGQGTKVEIR

SEQ ID NO: 1795 - protein, 8 aa, synthetic construct
GYAFSSSW

SEQ ID NO: 1796 - protein, 12 aa, synthetic construct
ARSGLLRYAMDY

SEQ ID NO: 1797 - protein, 119 aa, synthetic construct
QVQLQQSGPELKKPGASVKVSCKDSGYAFSSSWMNWVRQAPGQGLEWIGRIYPGDGDTNYNGKFQGRVTITADKSSSTAYMELSSLRSEDTAVYFCARSGLLRYAMDYWGQGTLVTVSS

SEQ ID NO: 1798 - protein, 5 aa, synthetic construct
LSVGY

SEQ ID NO: 1799 - protein, 9 aa, synthetic construct
FQGSGYPFT

SEQ ID NO: 1800 - protein, 107 aa, synthetic construct
DIQMTQSPSTLSASVGDRVTITCKCQLSVGYMHWYQQKPGKAPKLLIYDTSKLASGVPSRFSGSGSGTEFTLTISSLQPDDFATYYCFQGSGYPFTFGGGQTKLEIK

SEQ ID NO: 1801 - protein, 10 aa, synthetic construct
GFSLSTSGMS

SEQ ID NO: 1802 - protein, 7 aa, synthetic construct
IWWDDKK

SEQ ID NO: 1803 - protein, 12 aa, synthetic construct
ARSMITMWYFDV

SEQ ID NO: 1804 - protein, 120 aa, synthetic construct
QVTLRESGPALVKPTQTLTLTCTFSGFSLSTSGMSVGWIRQPPGKALEWLADIWWDDKKDYNPSLKSRLTISKDTSKNQVVLKVTNMDPADTATYYCARSMITMWYFDVWGAGTTVTVSS

SEQ ID NO: 1805 - protein, 9 aa, synthetic construct
QQYGSSTWT

SEQ ID NO: 1806 - protein, 108 aa, synthetic construct
EIVLTQSPGTLSLSPGERATLSCRASQSVSSSYLAWYQQKPGQAPRLLIYGASSRATGIPDRFSGSGSGTDFTLTISRLEPEDFAVYYCQQYGSSTWTFGQGTKVEIK

SEQ ID NO: 1807 - protein, 8 aa, synthetic construct
FYPGDSST

SEQ ID NO: 1808 - protein, 12 aa, synthetic construct
ARRRNWGNAFDI

SEQ ID NO: 1809 - protein, 119 aa, synthetic construct
EVQLVQSGAEVKKSGESLKISCKGSGYSFTSYWIGWVRQMPGKGLEWMGIFYPGDSSTRYSPSFQGQVTISADKSVNTAYLQWSSLKASDTAMYYCARRRNWGNAFDIWGQGTMVTVSS

SEQ ID NO: 1810 - protein, 6 aa, synthetic construct
QAFDNY

SEQ ID NO: 1811 - protein, 9 aa, synthetic construct
QNYNSAPLT

SEQ ID NO: 1812 - protein, 107 aa, synthetic construct [sequence omitted]

SEQ ID NO: 1813 - protein, 8 aa, synthetic construct
GFALRMYD

SEQ ID NO: 1814 - protein, 7 aa, synthetic construct
VGPSGDT

SEQ ID NO: 1815 - protein, 13 aa, synthetic construct
VRSDRGVAGLFDS

SEQ ID NO: 1816 - protein, 119 aa, synthetic construct
EVQLVESGGGLIQPGGSLRLSCAASGFALRMYDMHWVRQTIDKRLEWVSAVGPSGDTTYADSVKGRFAVSRENAKNSLSLQMNSLTAGDTAIYYCVRSDRGVAGLFDSWGQGILVTVSS

SEQ ID NO: 1817 - protein, 6 aa, synthetic construct
QSISTY

SEQ ID NO: 1818 - protein, 10 aa, synthetic construct
QQSFSTPPIN

SEQ ID NO: 1819 - protein, 108 aa, synthetic construct
DIQMTQSPSSLSASVGDRITITCRASQSISTYLHWYQQKPGKAPKLLIYAASTLQSGVPSRFSGSGSGTDFTLTISSLQPEDFATYYCQQSFSTPPINFGQGTKLEIK

SEQ ID NO: 1820 - protein, 8 aa, synthetic construct
GFTFNNYG

SEQ ID NO: 1821 - protein, 8 aa, synthetic construct
IWHDGSDK

SEQ ID NO: 1822 - protein, 9 aa, synthetic construct
ARNWNLFDY

SEQ ID NO: 1823 - protein, 116 aa, synthetic construct
QVQLVESGGGVVQPGRSLRLSCAASGFTFNNYGMHWVRQAPGMGLEWVAVIWHDGSDKYYADSVKGRFTISRDNSKNTLYLQMNSLRAEDTAVYYCARNWNLFDYWGQGTLVTVSS

SEQ ID NO: 1824 - protein, 6 aa, synthetic construct
QSISSF

SEQ ID NO: 1825 - protein, 8 aa, synthetic construct
QQSYSTLT

SEQ ID NO: 1826 - protein, 106 aa, synthetic construct
DIQMTQSPSSLSASVGDRVTITCRASQSISSFLNWYQQKPGKAPKLLIYAASSLQSGVPSRFSGSGSGTDFTLTISSLQPEDFATYYCQQSYSTLTFGQGTRLEIK

SEQ ID NO: 1827 - protein, 8 aa, synthetic construct
GFTSSSYA

SEQ ID NO: 1828 - protein, 8 aa, synthetic construct
ISGMGGST

SEQ ID NO: 1829 - protein, 11 aa, synthetic construct
AKRGYPHSFDI

SEQ ID NO: 1830 - protein, 118 aa, synthetic construct
EVQLVESGGGLVQPGGSLRLSCAASGFTSSSYAMNWVRQAPGKGLEWVSTISGMGGSTYYADSVKGRFTISRDNSKNTLYLQMNSLRAEDTAVYYCAKRGYPHSFDIWGQGTMVTVSS

SEQ ID NO: 1831 - protein, 6 aa, synthetic construct
QSISSY

SEQ ID NO: 1832 - protein, 9 aa, synthetic construct
QQSYSTPLT

SEQ ID NO: 1833 - protein, 107 aa, synthetic construct [sequence omitted]

SEQ ID NO: 1834 - protein, 8 aa, synthetic construct
GFAFSSYG

SEQ ID NO: 1835 - protein, 8 aa, synthetic construct
IWFDGTKK

SEQ ID NO: 1836 - protein, 17 aa, synthetic construct
ARDRGIGARRGPYYMDV

SEQ ID NO: 1837 - protein, 124 aa, synthetic construct
QVQLVESGGGVVQPGRSLRLSCAASGFAFSSYGMHWVRQAPGKGLEWVAVIWFDGTKKYYTDSVKGRFTISRDNSKNTLYLQMNTLRAEDTAVYYCARDRGIGARRGPYYMDVWGKGTTVTVSS

SEQ ID NO: 1838 - protein, 12 aa, synthetic construct
QSVLYRSNNRNF

SEQ ID NO: 1839 - protein, 9 aa, synthetic construct
QQYYTTPYT

SEQ ID NO: 1840 - protein, 113 aa, synthetic construct [sequence omitted]

SEQ ID NO: 1841 - protein, 8 aa, synthetic construct
GFTFNNYA

SEQ ID NO: 1842 - protein, 8 aa, synthetic construct
ISGSGGTT

SEQ ID NO: 1843 - protein, 11 aa, synthetic construct
AKDSNWGNFDL

SEQ ID NO: 1844 - protein, 118 aa, synthetic construct [sequence omitted]

SEQ ID NO: 1845 - protein, 9 aa, synthetic construct
SSDVGGYNS

SEQ ID NO: 1846 - protein, 9 aa, synthetic construct
NSYTSTSMV

SEQ ID NO: 1847 - protein, 109 aa, synthetic construct [sequence omitted]

SEQ ID NO: 1848 - protein, 8 aa, synthetic construct
GYTLTSYG

SEQ ID NO: 1849 - protein, 8 aa, synthetic construct
VSFYNGNT

SEQ ID NO: 1850 - protein, 8 aa, synthetic construct
ARGYGMDV

SEQ ID NO: 1851 - protein, 115 aa, synthetic construct [sequence omitted]

SEQ ID NO: 1852 - protein, 7 aa, synthetic construct
QSVSSSF

SEQ ID NO: 1853 - protein, 9 aa, synthetic construct
QQYDSSAIT

SEQ ID NO: 1854 - protein, 108 aa, synthetic construct [sequence omitted]

SEQ ID NO: 1855 - protein, 8 aa, synthetic construct
GYIFTNYW

SEQ ID NO: 1856 - protein, 8 aa, synthetic construct
IYPGDSDI

SEQ ID NO: 1857 - protein, 10 aa, synthetic construct
ARHDIEGFDY

SEQ ID NO: 1858 - protein, 117 aa, synthetic construct [sequence omitted]

SEQ ID NO: 1859 - protein, 8 aa, synthetic construct
TNNIGILG

SEQ ID NO: 1860 - protein, 11 aa, synthetic construct
QSFDTTLGAHV

SEQ ID NO: 1861 - protein, 110 aa, synthetic construct
QSVLTQPTSVSGSLGQRVTISCSGSTNNIGILGASWYQLFPGKAPKLLVYGNGNRPSGVPDRFSGADSGDSVTLTITGLQAEDEADYYCQSFDTTLGAHVFGGGTHLTVL

SEQ ID NO: 1862 - protein, 8 aa, synthetic construct
GFTFSSHG

SEQ ID NO: 1863 - protein, 8 aa, synthetic construct
INSGGSST

SEQ ID NO: 1864 - protein, 18 aa, synthetic construct
AKESVGGWEQLVGPHFDY

SEQ ID NO: 1865 - protein, 125 aa, synthetic construct
EVQLVESGGDLVKPGGSLRLSCVASGFTFSSHGMHWVRQSPGKGLQWVAVINSGGSSTYYTDAVKGRFTISRDNAKNTVYLQMNSLRAEDTAMYYCAKESVGGWEQLVGPHFDYWGQGTLVIVSS

SEQ ID NO: 1866 - protein, 11 aa, synthetic construct
QSLLESDGKTY

SEQ ID NO: 1867 - protein, 9 aa, synthetic construct
LQATHFPQT

SEQ ID NO: 1868 - protein, 112 aa, synthetic construct [sequence omitted]

SEQ ID NO: 1869 - protein, 8 aa, synthetic construct
ISRSGSYS

SEQ ID NO: 1870 - protein, 14 aa, synthetic construct
ARLGGYDEGDAMDS

SEQ ID NO: 1871 - protein, 121 aa, synthetic construct [sequence omitted]

SEQ ID NO: 1872 - protein, 10 aa, synthetic construct
QSVDYDGHSY

SEQ ID NO: 1873 - protein, 9 aa, synthetic construct
QQSDENPLT

SEQ ID NO: 1874 - protein, 111 aa, synthetic construct
DIQMTQSPSSLSASVGDRVTITCKASQSVDYDGHSYMNWYQQKPGKAPKLLIYAASNLESGVPSRFSGSGSGTDFTLTISSLQPEDFATYYCQQSDENPLTFGGGTKVEIK

SEQ ID NO: 1875 - protein, 8 aa, synthetic construct
IYPGDGSI

SEQ ID NO: 1876 - protein, 15 aa, synthetic construct
ARRGEYGNYEGAMDY

SEQ ID NO: 1877 - protein, 122 aa, synthetic construct
QVQLVQSGAEVKKPGASVKVSCKVSGYTFTSYDINWVRQAPGKGLEWMGWIYPGDGSIKYNEKFKGRVTMTVDKSTDTAYMELSSLRSEDTAVYYCARRGEYGNYEGAMDYWGQGTLVTVSS

SEQ ID NO: 1878 - protein, 11 aa, synthetic construct
QSLLYSRGKTY

SEQ ID NO: 1879 - protein, 9 aa, synthetic construct
VQGTHYPFT

SEQ ID NO: 1880 - protein, 112 aa, synthetic construct
DIVMTQTPLSLSVTPGQPASISCKSSQSLLYSRGKTYLNWLLQKPGQSPQLLIYAVSKLDSGVPDRFSGSGSGTDFTLKISRVEAEDVGVYYCVQGTHYPFTFGQGTKLEIK

SEQ ID NO: 1881 - protein, 8 aa, synthetic construct
GYDFTRYY

SEQ ID NO: 1882 - protein, 8 aa, synthetic construct
INPGSGNT

SEQ ID NO: 1883 - protein, 8 aa, synthetic construct
AREGITVY

SEQ ID NO: 1884 - protein, 115 aa, synthetic construct
QVQLVQSGAEVKKPGSSVKVSCKASGYDFTRYYINWVRQAPGQGLEWMGWINPGSGNTKYNEKFKGRVTITADESTSTAYMELSSLRSEDTAVYYCAREGITVYWGQGTTVTVSS

SEQ ID NO: 1885 - protein, 8 aa, synthetic construct
SGSIASNY

SEQ ID NO: 1886 - protein, 10 aa, synthetic construct
QSYDGSNRWM

SEQ ID NO: 1887 - protein, 111 aa, synthetic construct
NFMLTQPHSVSESPGKTVTISCTRSSGSIASNYVQWYQQRPGSSPTTVIYEDNQRPSGVPDRFSGSIDSSSNSASLTISGLKTEDEADYYCQSYDGSNRWMFGGGTKLTVL

SEQ ID NO: 1888 - protein, 8 aa, synthetic construct
ISGSGGST

SEQ ID NO: 1889 - protein, 16 aa, synthetic construct
AKDGSSGWYVPHWFDP

SEQ ID NO: 1890 - protein, 123 aa, synthetic construct
EVQLLESGGGLVQPGGSLRLSCAASGFTFSSYAMSWVRQAPGKGLEWVSAISGSGGSTYYADSVKGRFTISRDNSKNTLYLQMNSLRAEDTAVYYCAKDGSSGWYVPHWFDPWGQGTLVTVSS

SEQ ID NO: 1891 - protein, 8 aa, synthetic construct
QSVYHNTY

SEQ ID NO: 1892 - protein, 13 aa, synthetic construct
LGSYDCTNGDCFV

SEQ ID NO: 1893 - protein, 110 aa, synthetic construct
LTQSPSSLSASVGDRVTINCQASQSVYHNTYLAWYQQKPGKVPKQLIYDASTLASGVPSRFSGSGSGTDFTLTISSLQPEDVATYYCLGSYDCTNGDCFVFGGGTKVEIK

SEQ ID NO: 1894 - protein, 8 aa, synthetic construct
GIDLSGYY

SEQ ID NO: 1895 - protein, 7 aa, synthetic construct
IGINGAT

SEQ ID NO: 1896 - protein, 5 aa, synthetic construct
ARGDI

SEQ ID NO: 1897 - protein, 111 aa, synthetic construct
EVQLVESGGGLVQPGGSLRLSCAVSGIDLSGYYMNWVRQAPGKGLEWVGVIGINGATYYASWAKGRFTISRDNSKTTVYLQMNSLRAEDTAVYFCARGDIWGQGTLVTVSS

SEQ ID NO: 1898 - protein, 8 aa, synthetic construct
SSNIGNNY

SEQ ID NO: 1899 - protein, 11 aa, synthetic construct
GTWDSRLSAVV

SEQ ID NO: 1900 - protein, 110 aa, synthetic construct
QSVLTQPPSVSAAPGQKVTISCSGSSSNIGNNYVSWYQQLPGTAPKLLIYDNNKRPSGIPDRFSGSKSGTSTTLGITGLQTGDEADYYCGTWDSRLSAVVFGGGTKLTVL

SEQ ID NO: 1901 - protein, 8 aa, synthetic construct
GFTFSSFG

SEQ ID NO: 1902 - protein, 8 aa, synthetic construct
ISFDGSIK

SEQ ID NO: 1903 - protein, 23 aa, synthetic construct
ARDRLNYYDSSGYYHYKYYGMAV

SEQ ID NO: 1904 - protein, 128 aa, synthetic construct
QVQLVESGGGVVQPGRSLRLSCAASGFTFSSFGMHWVRQAPGKGLEWVAVISFDGSIKYSVDSVKGRFTISRDNSKNTLFLQMNSLRAEDTAVYYCARDRLNYYDSSGYYHYKYYGMAVWGQGTTVTV

SEQ ID NO: 1905 - protein, 6 aa, synthetic construct
QSIRSW

SEQ ID NO: 1906 - protein, 9 aa, synthetic construct
QQYNSYSYT

SEQ ID NO: 1907 - protein, 107 aa, synthetic construct
DIQMTQSPSTLSASVGDRVTITCRASQSIRSWLAWYQQKPGKAPKLLIYKASSLESGVPSRFSGSGSGTEFTLTISSLQPDDFATYYCQQYNSYSYTFGQGTKLEIK

SEQ ID NO: 1908 - protein, 8 aa, synthetic construct
ISGDGGST

SEQ ID NO: 1909 - protein, 19 aa, synthetic construct
AKDLRNTIFGVVIPDAFDI

SEQ ID NO: 1910 - protein, 126 aa, synthetic construct
EVQLVESGGGVIQPGGSLRLSCAASGFTFDDYAMNWVRQGPGKGLEWVSAISGDGGSTYYADSVKGRFTISRDNSKNSLYLQMNSLRAEDTAFFYCAKDLRNTIFGVVIPDAFDIWGQGTMVTVSS

SEQ ID NO: 1911 - protein, 6 aa, synthetic construct
KRVTTY

SEQ ID NO: 1912 - protein, 9 aa, synthetic construct
SQSYNYPYT

SEQ ID NO: 1913 - protein, 107 aa, synthetic construct
EIVLTQSPATLSLSPGERATLSCKASKRVTTYVSWYQQKPGQAPRLLIYGASNRYLGIPARFSGSGSGTDFTLTISSLEPEDFAVYYCSQSYNYPYTFGQGTKLEIK

SEQ ID NO: 1914 - protein, 10 aa, synthetic construct
IRSESDASAT

SEQ ID NO: 1915 - protein, 13 aa, synthetic construct
LAYFDYGLAIQNY

SEQ ID NO: 1916 - protein, 122 aa, synthetic construct
EVQLVESGGGLVQPGGSLRLSCAASGFTFSNYWISWVRQAPGKGLEWVAEIRSESDASATHYAEAVKGRFTISRDNAKNSLYLQMNSLRAEDTAVYYCLAYFDYGLAIQNYWGQGTLVTVSS

SEQ ID NO: 1917 - protein, 6 aa, synthetic construct
EDIYNA

SEQ ID NO: 1918 - protein, 9 aa, synthetic construct
QHYFHYPRT

SEQ ID NO: 1919 - protein, 107 aa, synthetic construct
DIEMTQSPLSLSVTPGESVSISCRASEDIYNALAWYLQKPGRSPRLLIYNTDTLHTGVPDRFSGSGSGTDFTLKISRVQTEDVGVYFCQHYFHYPRTFGQGTKLELK

SEQ ID NO: 1920 - protein, 8 aa, synthetic construct
GFSLTNNN

SEQ ID NO: 1921 - protein, 7 aa, synthetic construct
VWAGGAT

SEQ ID NO: 1922 - protein, 16 aa, synthetic construct
ARDGGYSSSTLYAMDA

SEQ ID NO: 1923 - protein, 122 aa, synthetic construct
QVQLVESGAELVQPGESLRLTCAASGFSLTNNNVNWVRQAPGKGLEWMGGVWAGGATDYNSALKSRLTITRDTSKNTVFLQMHSLQSEDTATYYCARDGGYSSSTLYAMDAWGQGTTVTVSA

SEQ ID NO: 1924 - protein, 6 aa, synthetic construct
KDISKY

SEQ ID NO: 1925 - protein, 9 aa, synthetic construct
QQGDALPPT

SEQ ID NO: 1926 - protein, 107 aa, synthetic construct
DIQMTQSPSSLSASVGDRVTITCRASKDISKYLNWYQQKPGKAPKLLIYYTSGYHSGVPSRFSGSGSGTDFTLTISSLQPEDFATYYCQQGDALPPTFGGGTKVEIK

SEQ ID NO: 1927 - protein, 8 aa, synthetic construct
GYTFGNYW

SEQ ID NO: 1928 - protein, 8 aa, synthetic construct
IYEGTGKT

SEQ ID NO: 1929 - protein, 12 aa, synthetic construct
ARLSDYVSGFGY

SEQ ID NO: 1930 - protein, 119 aa, synthetic construct
QVQLVQSGAEVKKPGSSVKVSCKASGYTFGNYWMQWVRQAPGQGLEWMGAIYEGTGKTVYIQKFADRVTITADKSTSTAYMELSSLRSEDTAVYYCARLSDYVSGFGYWGQGTTVTVSS

SEQ ID NO: 1931 - protein, 11 aa, synthetic construct
QSLLYTDGKTY

SEQ ID NO: 1932 - protein, 9 aa, synthetic construct
LQSTHFPHT

SEQ ID NO: 1933 - protein, 112 aa, synthetic construct
DVVMTQSPLSLPVTLGQPASISCKSSQSLLYTDGKTYLYWFLQRPGQSPRRLIYLVSKLDSGVPDRFSGSGSGTDFTLKISRVEAEDVGVYYCLQSTHFPHTFGGGTKVEIK

SEQ ID NO: 1934 - protein, 8 aa, synthetic construct
GFSLTSYI

SEQ ID NO: 1935 - protein, 7 aa, synthetic construct
IWAGGST

SEQ ID NO: 1936 - protein, 16 aa, synthetic construct
ASAAYYSYYNYDGFAY

SEQ ID NO: 1937 - protein, 122 aa, synthetic construct
QVQLQESGPGLVKPSETLSLTCTVSGFSLTSYIVDWIRQPPGKGLEWIGVIWAGGSTGYNSALRSRVSITKDTSKNQFSLKLSSVTAADTAVYYCASAAYYSYYNYDGFAYWGQGTLVTVSS

SEQ ID NO: 1938 - protein, 6 aa, synthetic construct
QSISSW

SEQ ID NO: 1939 - protein, 8 aa, synthetic construct
QQYNTYWT

SEQ ID NO: 1940 - protein, 106 aa, synthetic construct
DIQMTQSPSTLSASVGDRVTITCRASQSISSWLAWYQQKPGKAPKLLIYKASTLESGVPSRFSGSGSGTEFTLTISSLQPDDFATYYCQQYNTYWTFGQGTKVEIK

SEQ ID NO: 1941 - protein, 8 aa, synthetic construct
GFTFSHYI

SEQ ID NO: 1942 - protein, 8 aa, synthetic construct
IYSSGGIT

SEQ ID NO: 1943 - protein, 15 aa, synthetic construct
AYRRIGVPRRDEFDI

SEQ ID NO: 1944 - protein, 122 aa, synthetic construct
EVQLLESGGGLVQPGGSLRLSCAASGFTFSHYIMMWVRQAPGKGLEWVSGIYSSGGITVYADSVKGRFTISRDNSKNTLYLQMNSLRAEDTAVYYCAYRRIGVPRRDEFDIWGQGTMVTVSS

SEQ ID NO: 1945 - protein, 11 aa, synthetic construct
QSIVHSNGNTY

SEQ ID NO: 1946 - protein, 9 aa, synthetic construct
FQGSHVPPT

SEQ ID NO: 1947 - protein, 112 aa, synthetic construct
DVVMTQSPLSLPVTPGAPASISCRSSQSIVHSNGNTYLEWYLQKPGQSPKLLIYKVSNRFSGVPDRFSGSGSGTDFTLRISRVEAEDVGIYYCFQGSHVPPTFGPGTKLEIK

SEQ ID NO: 1948 - protein, 8 aa, synthetic construct
ISSGSSTI

SEQ ID NO: 1949 - protein, 17 aa, synthetic construct
AREGGYYYGRSYYTMDY

SEQ ID NO: 1950 - protein, 124 aa, synthetic construct
EVQLVESGGGLVQPGGSLRLSCSASGFTFSSFGMHWVRQAPGKGLEWVAYISSGSSTIYYGDTVKGRFTISRDNAKNSLFLQMSSLRAEDTAVYYCAREGGYYYGRSYYTMDYWGQGTTVTVSS

SEQ ID NO: 1951 - protein, 9 aa, synthetic construct
QQSHEDPYT

SEQ ID NO: 1952 - protein, 111 aa, synthetic construct [sequence omitted]

SEQ ID NO: 1953 - protein, 8 aa, synthetic construct
GYSITSGY

SEQ ID NO: 1954 - protein, 8 aa, synthetic construct
SITYDGST

SEQ ID NO: 1955 - protein, 14 aa, synthetic construct
ARGSHYFGHWHFAV

SEQ ID NO: 1956 - protein, 121 aa, synthetic construct [sequence omitted]

SEQ ID NO: 1957 - protein, 9 aa, synthetic construct
QQGDTLPYT

SEQ ID NO: 1958 - protein, 107 aa, synthetic construct [sequence omitted]

SEQ ID NO: 1959 - protein, 8 aa, synthetic construct
GYTFTDYN

SEQ ID NO: 1960 - protein, 8 aa, synthetic construct
INPNSGGA

SEQ ID NO: 1961 - protein, 16 aa, synthetic construct
ARLGYDDIYDDWYFDV

SEQ ID NO: 1962 - protein, 123 aa, synthetic construct [sequence omitted]

SEQ ID NO: 1963 - protein, 11 aa, synthetic construct
QSLVGASGKTY

SEQ ID NO: 1964 - protein, 9 aa, synthetic construct
LQGTHFPHT

SEQ ID NO: 1965 - protein, 112 aa, synthetic construct [sequence omitted]

SEQ ID NO: 1966 - protein, 8 aa, synthetic construct
GFTFSNYG

SEQ ID NO: 1967 - protein, 8 aa, synthetic construct
IDSDGDNT

SEQ ID NO: 1968 - protein, 10 aa, synthetic construct
TTGIVRPFLY

SEQ ID NO: 1969 - protein, 117 aa, synthetic construct [sequence omitted]

SEQ ID NO: 1970 - protein, 10 aa, synthetic construct
HQYYRLPPIT

SEQ ID NO: 1971 - protein, 109 aa, synthetic construct
QIVLTQSPATLSLSPGERATMSCTASSSVSSSYLHWYQQKPGKAPKLWIYSTSNLASGVPSRFSGSGSGTDYTLTISSLQPEDFATYYCHQYYRLPPITFGQGTKLEIK

SEQ ID NO: 1972 - protein, 8 aa, synthetic construct
ISSGGSHT

SEQ ID NO: 1973 - protein, 11 aa, synthetic construct
ARLFTGYAMDY

SEQ ID NO: 1974 - protein, 118 aa, synthetic construct
EVQLVESGGGLVKPGGSLRLSCAASGFTFSNYAMSWVRQAPGKGLEWVATISSGGSHTYYLDSVKGRFTISRDNSKNTLYLQMNSLRAEDTALYYCARLFTGYAMDYWGQGTLVTVSS

SEQ ID NO: 1975 - protein, 13 aa, synthetic construct
ARGDYYGSNSLDY

SEQ ID NO: 1976 - protein, 9 aa, synthetic construct
LQDSEYPWT

SEQ ID NO: 1977 - protein, 11 aa, synthetic construct
GEKSLGSRAVQ

SEQ ID NO: 1978 - protein, 7 aa, synthetic construct
NNQDRPS

SEQ ID NO: 1979 - protein, 9 aa, synthetic construct
DSRVPTKWV

SEQ ID NO: 1980 - protein, 105 aa, synthetic construct
SDISVAPGETARISCGEKSLGSRAVQWYQHRAGQAPSLIIYNNQDRPSGIPERFSGSPDSPFGTTATLTITSVEAGDEADYYCHIWDSRVPTKWVFGGGTTLTVL

SEQ ID NO: 1981 - protein, 5 aa, synthetic construct
DSYWS

SEQ ID NO: 1982 - protein, 16 aa, synthetic construct
YVHKSGDTNYSPSLKS

SEQ ID NO: 1983 - protein, 24 aa, synthetic construct
TLHGRRIYGIVAFNEWFTYFYMDV

SEQ ID NO: 1984 - protein, 132 aa, synthetic construct
QMQLQESGPGLVKPSETLSLTCSVSGASISDSYWSWIRRSPGKGLEWIGYVHKSGDTNYSPSLKSRVNLSLDTSKNQVSLSLVAATAADSGKYYCARTLHGRRIYGIVAFNEWFTYFYMDVWGNGTQVTVSS

SEQ ID NO: 1985 - protein, 9 aa, synthetic construct
RTSQYGSLA

SEQ ID NO: 1986 - protein, 7 aa, synthetic construct
SGSTRAA

SEQ ID NO: 1987 - protein, 5 aa, synthetic construct
QQYEF

SEQ ID NO: 1988 - protein, 100 aa, synthetic construct
LTQSPGTLSLSPGETAIISCRTSQYGSLAWYQQRPGQAPRLVIYSGSTRAAGIPDRFSGSRWGPDYNLTISNLESGDFGVYYCQQYEFFGQGTKVQVDIK

SEQ ID NO: 1989 - protein, 5 aa, synthetic construct
DCTLN

SEQ ID NO: 1990 - protein, 17 aa, synthetic construct
WLKPRGGAVNYARPLQG

SEQ ID NO: 1991 - protein, 12 aa, synthetic construct
GKNCDYNWDFEH

SEQ ID NO: 1992 - protein, 121 aa, synthetic construct
QVQLVQSGGQMKKPGESMRISCRASGYEFIDCTLNWIRLAPGKRPEWMGWLKPRGGAVNYARPLQGRVTMTRDVYSDTAFLELRSLTVDDTAVYFCTRGKNCDYNWDFEHWGRGTPVIVSS

SEQ ID NO: 1993 - protein, 11 aa, synthetic construct
RGDSLRSHYAS

SEQ ID NO: 1994 - protein, 7 aa, synthetic construct
GKNNRPS

SEQ ID NO: 1995 - protein, 12 aa, synthetic construct
SSRDKSGSRLSV

SEQ ID NO: 1996 - protein, 108 aa, synthetic construct
SELTQDPAVSVALKQTVTITCRGDSLRSHYASWYQKKPGQAPVLLFYGKNNRPSGIPDRFSGSASGNRASLTITGAQAEDEADYYCSSRDKSGSRLSVFGGGTKLTVL

SEQ ID NO: 1997 - protein, 5 aa, synthetic construct
NAWMT

SEQ ID NO: 1998 - protein, 19 aa, synthetic construct
RITGPGEGWSVDYAESVKG

SEQ ID NO: 1999 - protein, 20 aa, synthetic construct
TGKYYDFWSGYPPGEEYFQD

SEQ ID NO: 2000 - protein, 131 aa, synthetic construct
EVRLVESGGGLVKPGGSLRLSCSASGFDFDNAWMTWVRQPPGKGLEWVGRITGPGEGWSVDYAESVKGRFTISRDNTKNTLYLEMNNVRTEDTGYYFCARTGKYYDFWSGYPPGEEYFQDWGQGTLVIVSS

SEQ ID NO: 2001 - protein, 14 aa, synthetic construct
NGTSSDVGGFDSVS

SEQ ID NO: 2002 - protein, 7 aa, synthetic construct
DVSHRPS

SEQ ID NO: 2003 - protein, 10 aa, synthetic construct
SSLTDRSHRI

SEQ ID NO: 2004 - protein, 110 aa, synthetic construct
QSALTQPASVSGSPGQTITISCNGTSSDVGGFDSVSWYQQSPGKAPKVMVFDVSHRPSGISNRFSGSKSGNTASLTISGLHIEDEGDYFCSSLTDRSHRIFGGGTKVTVL

SEQ ID NO: 2005 - protein, 5 aa, synthetic construct
KYGMH

SEQ ID NO: 2006 - protein, 17 aa, synthetic construct
LISDDGMRKYHSDSMWG

SEQ ID NO: 2007 - protein, 28 aa, synthetic construct
EAGGPIWHDDVKYYDFNDGYYNYHYMDV

SEQ ID NO: 2008 - protein, 137 aa, synthetic construct
QEQLVESGGGVVQPGGSLRLSCLASGFTFHKYGMHWVRQAPGKGLEWVALISDDGMRKYHSDSMWGRVTISRDNSKNTLYLQFSSLKVEDTAMFFCAREAGGPIWHDDVKYYDFNDGYYNYHYMDVWGKGTTVTVSS

SEQ ID NO: 2009 - protein, 9 aa, synthetic construct
QQWSSNPFT
